(19) United States
(12) Patent Application Publication
(10) Pub. No.: US 2017/0247702 A1
(43) Pub. Date: Aug. 31, 2017

(54) PDGF and VEGF Aptamers Having Improved Stability and Their Use in Treating PDGF and VEGF Mediated Diseases and Disorders

(71) Applicant: SomaLogic, Inc., Boulder, CO (US)

(72) Inventors: Nebojsa Janjic, Boulder, CO (US); Daniel W. Drolet, Boulder, CO (US); Amy D. Gelinas, Lafayette, CO (US); Chi Zhang, Superior, CO (US); Michael Vrkljan, Mead, CO (US)

(21) Appl. No.: 15/594,921

(22) Filed: May 15, 2017

Related U.S. Application Data
(62) Division of application No. 14/909,305, filed on Feb. 1, 2016, now Pat. No. 9,695,424.
(60) Provisional application No. 61/875,660, filed on Sep. 9, 2013.

(51) Int. Cl. C12N 15/115

(52) U.S. Cl. CPC C12N 15/115; C12N 2310/16; C12N 2310/315; C12N 2310/321; C12N 2310/3341; C12N 2310/344; C12N 2310/346; C12N 2320/51

(57) ABSTRACT

Aptamers having improved stability against nucleases that bind PDGF and aptamers that bind VEGF are provided. In addition, aptamer constructs comprising a PDGF aptamer and a VEGF aptamer are provided. Pharmaceutical compositions comprising the aptamers and aptamer constructs are provided, as well as methods of treating conditions using the aptamers and aptamer constructs.

### CROSS REFERENCE TO RELATED APPLICATIONS

[0001] This application is a divisional of U.S. application Ser. No. 14/909,305, filed Feb. 1, 2016. U.S. application Ser. No. 14/909,305 is a 35 U.S.C. §371 national phase application of International Application Serial No. PCT/US2014/054561 (WO 2015/035305), filed Sep. 8, 2014. International Application Serial No. PCT/US2014/054561 claims priority to U.S. Provisional Application Ser. No. 61/875,660, filed Sep. 9, 2013, which application is incorporated by reference in its entirety.

[0002] Incorporated by reference herein in its entirety is the Sequence Listing entitled “sequence Listing.txt”, created Mar. 21, 2017, size of 1010 kilobytes.

### FIELD OF THE INVENTION

[0003] The present disclosure relates generally to the field of nucleic acids and more particularly to aptamers capable of binding to platelet-derived growth factor (PDGF) and aptamers capable of binding to vascular endothelial growth factor (VEGF). In some embodiments, such aptamers are useful as therapeutics for preventing, treating, and/or ameliorating proliferative disorders, including, but not limited to, atherosclerosis, macular degeneration, fibrosis, cancer, and other disorders in which PDGF and/or VEGF has been implicated. In some embodiments, the present disclosure relates to aptamer constructs that are capable of binding to VEGF and PDGF, either simultaneously or in a mutually exclusive manner, and are useful as therapeutics.

### BACKGROUND

[0004] The following description provides a summary, of information, and is not an admission that any of the information provided or publications referenced herein is prior art to the present disclosure.

[0005] Platelet-derived growth factors (PDGF-A, -B, -C and -D) are ubiquitous mitogens and chemotactic factors for many connective tissue cells (Fredriksson, L., et al. (2004) Cytokine Growth Factor Rev. 15(4):197). PDGFs occur as disulfide-linked dimers and contain a cysteine-knot-fold growth factor domain that functions through binding to PDGF receptors α and β on the surface of a cell (Claesson-Welsh, L., et al. (1989) Proc. Natl. Acad. Sci. USA 86:4917). PDGF binding induces receptor dimerization, which leads to autophosphorylation at intracellular tyrosine residues (Claesson-Welsh, J. (1994) Biol. Chem. 269:32023). PDGF-BB is involved in several proliferative disorders, including atherosclerosis, fibrosis, macular degeneration, and cancer (Östman, A., et al. (2001) Adv. Cancer Res. 80:1; Appelmann, I., et al. (2010) Recent Results Cancer Res. 180:51; Trojanowska, M., et al. (2008) Rheumatology (Oxford) 47(Suppl 5):2; Rutherford et al. (1997) Atherosclerosis 130:45; Smits et al. (1992) Am. J. Pathol. 140:639; Heldin et al. (1991) Endocrinology 129:2187; Floege and Johnson (1995) Miner. Electrolyte Metab. 21:271; Raines et al. (1990) Experimental Pharmacology, Peptide Growth Factors and Their Receptors, Sporn & Roberts, pp. 173-262, Springer, Heidelberg.).

[0006] VEGF is a secreted disulfide-linked homodimer that selectively stimulates endothelial cells to proliferate, migrate and produce matrix-degrading enzymes, all of which are processes required for the formation of new blood vessels (Conn, G., et al. (1990) Proc. Natl. Acad. Sci. USA 87:1323; Ferrara, N. et al. (1989) Biochem. Biophys. Res. Commun. 161:851; Gospodarowicz, D., et al. (1989) Proc. Natl. Acad. Sci. USA 86:7311; Pepper, M. S., et al. (1991) Biochem. Biophys. Res. Commun. 181:902; Unemori, E. N., et al. (1992) J. Cell. Physiol. 153:557). In addition to being the only known endothelial cell-specific mitogen, VEGF is unique among angiogenic growth factors in its ability to induce a transient increase in blood vessel permeability to macromolecules (Dvorak, H. F., et al. (1979) J. Immunol. 122:166; Senger, D. R., et al. (1983) Science 219:983; Senger, D. R., et al. (1986) Cancer Res. 46:5629). Increased vascular permeability and the resulting deposition of plasma proteins in the extravascular space facilitate new vessel formation by providing a provisional matrix for the migration of endothelial cells. Hyperpermeability is indeed a characteristic feature of new vessels (Dvorak, H. F., et al. (1995) Am. J. Pathol. 146:1029). Furthermore, compensatory angiogenesis induced by tissue hypoxia is also mediated by VEGF (Levy, A. P., et al. (1996) J. Biol. Chem. 271:2746; Shweiki, D., et al. (1991) Nature 359:843). The identification of VEGF as a hypoxia-inducible protein, along with the complementary observation that hyperoxia causes suppression of VEGF expression, provides an appealing mechanism for matching oxygen demand with vascular supply (Benjamin, L. E., et al. (1999) J. Clin. Invest. 103:159; Alon, T., et al. (1995) Nat. Med. 1:1024).

[0007] Several isoforms of VEGF protein occur as a result of alternative splicing of the eight exons of the gene that encodes VEGF (Eming, S. A., et al. (2006) J. Invest. Dermatol. Symp. Proc. 11:79). The most prevalent isoforms are VEGF-121, VEGF-165 and VEGF-189. Proteolytic processing of VEGF can generate additional isoforms. VEGF-165 can be cleaved by plasmin between Arg-110 and Ala-111 to generate VEGF-110, which is functionally equivalent to VEGF-121 (Keyt, B. A., et al. (1996) J. Biol. Chem. 271:7788). VEGF-189 can be cleaved by urokinase within the exon 6 domain and then can be cleaved further by plasmin to generate VEGF-110 (Plouet, J., et al., (1997) J. Biol. Chem. 272:13390). In addition, a subset of matrix metalloproteases (MMPs), including MMP-3, -7, -9 and -19, are capable of cleaving VEGF-165 and VEGF-189 in sequential steps to generate VEGF-113, which is functionally equivalent to VEGF-110. Therefore, the relative abundance of matrix-bound and diffusible forms of VEGF in a given tissue is determined by the combination of alternative splicing and proteolytic processing that occurs in the cells of the tissue (Ferrara, N., et al. (2006) Retina 26:859).

[0008] Age-related macular degeneration (AMD) remains the leading cause of blindness in people over 55 years of age. The disease is characterized by the formation of insoluble deposits called drusen within the macula, the part of the retina that has the highest density of photoreceptors and is involved in central vision. In the initial stages of AMD, the deposits are avascular and the disease generally progresses slowly. However, in about 10% of the patients, this so-called “dry” form of AMD becomes vascularized and turns into the “wet” form of AMD, during which the disease becomes more progressive and vision deteriorates at a faster rate. In many cases, the progression from blurriness of central vision to virtual blindness occurs in less than two years. In the advanced stage of the disease, the exudative or wet form of AMD, new blood vessels penetrate from the choriocapillaris into the central part of the retina (macula), occluding central vision. In the United States, the prevalence of wet AMD is about 1.8 million and is expected to increase to close to 3 million by 2020. The incidence of wet AMD in the United States is about 210,000 people each year.

[0009] Recently, AMD has been treated by blocking VEGF-mediated induction of angiogenesis and blood vessels leakiness by direct injection into the eye of high-affinity antagonists that bind to VEGF, preventing interaction of VEGF with its cell-surface receptors on endothelial cells.

[0010] There is considerable evidence that dual inhibition of VEGF and PDGF-B signaling leads to more efficient blocking of angiogenesis coupled with regression of new blood vessels. For example, clinical evidence suggests that dual inhibition of VEGF and PDGF-B can achieve a more complete inhibition of ocular angiogenesis in AMD patients. An aptamer inhibitor of PDGF-B (E10030), originally discovered at NeXstar Pharmaceuticals (Green, L. S., et al. (1996) Biochemistry 35:14413; U.S. Pat. Nos. 6,207,816; 5,731,144; 5,731,424; and 6,124,449), is being developed by Ophthotech Corporation as a treatment for AMD. E10030 (Fovista®) is a DNA-based modified aptamer that binds to PDGF-AB or PDGF-BB with a K_{d} of approximately 100 pM and inhibits the functions of PDGF-B both in vitro and in vivo.

[0011] In a Phase 1 study, anti-PDGF therapy with E10030 tested in combination with Lucentis® anti-VEGF therapy resulted in vision gain of three lines in 59% of treated patients after 12 weeks of therapy. This is a considerably higher percentage of patients with improved visual acuity compared to the 34-40% observed historically with Lucentis alone. In addition, the combination treatment was accompanied with marked neovascular regression in all study participants. Enhanced efficacy with combination treatment was recently corroborated in a phase 2 study of 449 patients with wet AMD. Patients receiving the combination of Fovista (1.5 mg) and Lucentis gained a mean of 10.6 letters of vision at 24 weeks, compared to 6.5 letters for patients receiving Lucentis monotherapy (p=0.019), representing a 62% additional visual acuity benefit.

### SUMMARY

[0012] The present disclosure provides aptamers that bind to platelet-derived growth factor B (PDGF-B, including PDGF-BB and PDGF-AB), aptamers that bind vascular endothelial growth factor (VEGF, including VEGF-121 and VEGF-165), and aptamer constructs comprising an aptamer that binds PDGF-B and an aptamer that binds VEGF. The disclosed aptamers and aptamer constructs are useful as therapeutics for preventing, treating, and/or ameliorating proliferating diseases or conditions, including but not limited to, atherosclerosis, macular degeneration, fibrosis, diabetic retinopathy, and cancer, and/or other diseases or conditions in which PDGF and/or VEGF is implicated. In various embodiments, the aptamer constructs are capable of binding to each of VEGF and PDGF-B independently and/or VEGF and PDGF-B simultaneously. Included are pharmaceutical compositions or formulations comprising a PDGF aptamer, a VEGF aptamer, or a VEGF/PDGF-B aptamer construct, or a pharmaceutically acceptable salt of any of the foregoing, and at least one pharmaceutically acceptable carrier. Such compositions can be prepared in any suitable pharmaceutically acceptable dosage form.

[0013] In one aspect, the disclosure provides for a nucleic acid molecule comprising the nucleic sequence: 5′-C-G-A-C-A-G-C-A-Z-G-Z-A-Z-G-C-A-C-A-Z-C-Z-3′ (SEQ ID NO: 830), wherein Z is a C-5 modified pyrimidine, and at least one of positions 4, 9, 10, 11 and 12 of the nucleic acid molecule comprise a phosphorothioate linkage or moiety, wherein position 1 is the first nucleoside starting from the 5′-terminus of the nucleic acid molecule. In a related aspect, the at least two, three, four or five of positions 4, 9, 10, 11 and 12 of the nucleic acid molecule comprise a phosphorothioate linkage or moiety, and wherein position 1 is the first nucleoside starting from the 5′-terminus of the nucleic acid molecule.

[0014] In another aspect, the nucleic acid molecule comprises at least one, two, three, four, five, six, seven, eight, nine or ten 2′-O-methyl nucleosides. In a related aspect, at least one of positions 1, 4, 6, 7, 14, 15, 16, 17, 18, 20 and 21 of the nucleic acid molecule comprise a 2′-O-methyl modification, and wherein position 1 is the first nucleoside starting from the 5′-terminus of the nucleic acid molecule. In yet another related aspect, the at least two, three, four, five, six, seven, eight, nine, ten or eleven of positions 1, 4, 6, 7, 14, 15, 16, 17, 18, 20 and 21 of the nucleic acid molecule comprise a 2′-O-methyl modification, and wherein position 1 is the first nucleoside starting from the 5′-terminus of the nucleic acid molecule.

[0015] In another aspect, the C-5 modified pyrimidine independently, and for each occurrence, is selected from the group consisting a 5-(N-benzylcarboxyamide)-2′-deoxyuridine (BndU), 5-(N-benzylcarboxyamide)-2′-O-methyluridine, 5-(N-benzylcarboxyamide)-2′-fluorouridine, 5-(N-phenethylcarboxyamide)-2′-deoxyuridine (PedU), 5-(N-thiophenylmethylcarboxyamide)-2′-deoxyuridine (ThdU), 5-(N-isobutylcarboxyamide)-2′-deoxyuridine (iBudU), 5-(N-isobutylcarboxyamide)-2′-O-methyluridine, 5-(N-isobutylcarboxyamide)-2′-fluorouridine, 5-(N-tryptaminocarboxyamide)-2′-deoxyuridine (TrpdU), 5-(N-tryptaminocarboxyamide)-2′-O-methyluridine, 5-(N-tryptaminocarboxyamide)-2′-fluorouridine, 5-(N-[1-(3-trimethylamonium) propyl]carboxyamide)-2′-deoxyuridine chloride, 5-(N-naphthylmethylcarboxyamide)-2′-deoxyuridine (NapdU), 5-(N-naphthylmethylcarboxyamide)-2′-O-methyluridine, 5-(N-naphthylmethylcarboxyamide)-2′-fluorouridine, and 5-(N-[1-(2,3-dihydroxypropyl)]carboxyamide)-2′-deoxyuridine). In a related aspect, the C-5 modified pyrimidine is a 5-(N-naphthylmethylcarboxyamide)-2′-deoxyuridine (NapdU).

[0016] In another aspect, the nucleic acid molecule comprises DNA, RNA or a combination thereof.

[0017] In another aspect, the nucleic acid molecule binds a PDGF protein with a binding affinity of less than 10 nM, less than 5 nM, less than 2 nM, or less than 1 nM.

[0018] In another aspect, the nucleic acid molecule further comprises an inverted deoxynucleotide at the 3′ terminus of the nucleic acid molecule. In a related aspect, the deoxynucleotide is a deoxythymidine.

[0019] In another aspect, the nucleic acid molecule is less sensitive to a nuclease compared to the same nucleic acid molecule without a phosphorothioate linkage or moiety. In a related aspect, the nuclease is a DNase enzyme. In yet another related aspect, the DNase enzyme is a DNase I or DNase II enzyme.

[0020] In another aspect, the nucleic acid molecule is more stable in viterous humor from New Zealand White Rabbits compared to the same nucleic acid molecule without a phosphorothioate linkage or moiety.

[0021] In another aspect, the nucleic acid molecule is selected from the group consisting of the 5169 aptamers having the following aptamer ID number 146, 150-159, 172-182 and 188.

[0022] In a related aspect, the nucleic acid molecule comprises eleven 2′-O-methyl nucleosides and four or five phosphorothioate linkages or moieties.

[0023] In a related aspect, the nucleic acid molecule comprises at least one nucleotide having a phosphorothioate linkage or moiety and a 2′-O-methyl group.

[0024] In another aspect, this disclosure provides for a nucleic acid molecule comprising the nucleic sequence: 5′-C-C-G-Z-Z-C-A-A-G-Z-G-C-Z-Z-G-Z-A-G-G-A-Z-Z-Z-A-A-A-Z-G-G-3′ (SEQ ID NO: 831), wherein Z is a C-5 modified pyrimidine, and at least one of positions 24, 25 and 26 of the nucleic acid molecule comprise a phosphorothioate linkage or moiety, wherein position 1 is the first nucleoside starting from the 5′-terminus of the nucleic acid molecule. In a related aspect, at least two or three of positions 24, 25 and 26 comprise a phosphorothioate linkage or moiety, and wherein position 1 is the first nucleoside starting from the 5′-terminus of the nucleic acid molecule.

[0025] In a related aspect, the nucleic acid molecule comprises at least one, two, three, four, five, six, seven, eight or nine 2′-O-methyl nucleosides.

[0026] In another aspect, at least one of positions 1, 6, 9, 12, 15, 17, 18, 22, 28 and 29 of the nucleic acid molecule comprise a 2′-O-methyl modification, and wherein position 1 is the first nucleoside starting from the 5′-terminus of the nucleic acid molecule. In a related aspect, at least two, three, four, five, six, seven, eight or nine of positions 1, 6, 9, 12, 15, 17, 18, 22, 28 and 29 of the nucleic acid molecule comprise a 2′-O-methyl modification, and wherein position 1 is the first nucleoside starting from the 5′-terminus of the nucleic acid molecule.

[0027] In another aspect, the C-5 modified pyrimidine independently, and for each occurrence, is selected from the group consisting a 5-(N-benzylcarboxyamide)-2′-deoxyuridine (BndU), 5-(N-benzylcarboxyamide)-2′-O-methyluridine, 5-(N-benzylcarboxyamide)-2′-fluorouridine, 5-(N-phenethylcarboxyamide)-2′-deoxyuridine (PedU), 5-(N-thiophenylmethylcarboxyamide)-2′-deoxyuridine (ThdU), 5-(N-isobutylcarboxyamide)-2′-deoxyuridine (iBudU), 5-(N-isobutylcarboxyamide)-2′-O-methyluridine, 5-(N-isobutylcarboxyamide)-2′-fluorouridine, 5-(N-tryptaminocarboxyamide)-2′-deoxyuridine (TrpdU), 5-(N-tryptaminocarboxyamide)-2′-O-methyluridine, 5-(N-tryptaminocarboxyamide)-2′-fluorouridine, 5-(N-[1-(3-trimethylamonium) propyl]carboxyamide)-2′-deoxyuridine chloride, 5-(N-naphthylmethylcarboxyamide)-2′-deoxyuridine (NapdU), 5-(N-naphthylmethylcarboxyamide)-2′-O-methyluridine, 5-(N-naphthylmethylcarboxyamide)-2′-fluorouridine, and 5-(N-[1-(2,3-dihydroxypropyl)]carboxyamide)-2′-deoxyuridine). In a related aspect, the C-5 modified pyrimidine is a 5-(N-naphthylmethylcarboxyamide)-2′-deoxyuridine (NapdU).

[0028] In another aspect, the nucleic acid molecule comprises DNA, RNA or a combination thereof.

[0029] In another aspect, the nucleic acid molecule binds a VEGF protein with a binding affinity of less than 10 nM, less than 5 nM, less than 2 nM, or less than 1 nM.

[0030] In another aspect, the nucleic acid molecule further comprises an inverted deoxynucleotide at the 3′ terminus of the nucleic acid molecule. In a related aspect, the deoxynucleotide is a deoxythymidine.

[0031] In another aspect, the nucleic acid molecule is less sensitive to a nuclease compared to the same nucleic acid molecule without a phosphorothioate linkage or moiety. In a related aspect, the nuclease is a DNase enzyme. In yet another related aspect, the DNase enzyme is a DNase I or DNase II enzyme.

[0032] In another aspect, the nucleic acid molecule is more stable in viterous humor from New Zealand White Rabbits compared to the same nucleic acid molecule without a phosphorothioate linkage or moiety.

[0033] In another aspect, the nucleic acid molecule is selected from the group consisting of the 4867-31 aptamers having the following aptamer ID number 192, 409-417, 419-429, 438-445 and 475-483.

[0034] In another aspect, the nucleic acid molecule comprises nine or ten 2′-O-methyl nucleosides and one, two or three phosphorothioate linkages or moieties.

[0035] In another aspect, the nucleic acid molecule comprises at least one nucleotide having a phosphorothioate linkage or moiety and a 2′-O-methyl group.

[0036] In another aspect, the disclosure provides a nucleic acid molecule comprising the nucleic sequence: 5′-Z-Z″-A-C-H-G-Z-Z-A-C-V-C-G-C-G-Z′-Z-Z-A-Z-A-G-C-G-3′ (SEQ ID NO: 832), wherein Z, Z′ and Z″ are independently, for each occurrence selected from the group consisting of 5-(N-benzylcarboxyamide)-2′-deoxyuridine (BndU), 5-(N-benzylcarboxyamide)-2′-O-methyluridine, 5-(N-benzylcarboxyamide)-2′-fluorouridine, 5-(N-phenethylcarboxyamide)-2′-deoxyuridine (PedU), 5-(N-thiophenylmethylcarboxyamide)-2′-deoxyuridine (ThdU), 5-(N-isobutylcarboxyamide)-2′-deoxyuridine (iBudU), 5-(N-isobutylcarboxyamide)-2′-O-methyluridine, 5-(N-isobutylcarboxyamide)-2′-fluorouridine, 5-(N-tryptaminocarboxyamide)-2′-deoxyuridine (TrpdU), 5-(N-tryptaminocarboxyamide)-2′-O-methyluridine, 5-(N-tryptaminocarboxyamide)-2′-fluorouridine, 5-(N-[1-(3-trimethylamonium) propyl]carboxyamide)-2′-deoxyuridine chloride, 5-(N-naphthylmethylcarboxyamide)-2′-deoxyuridine (NapdU), 5-(N-naphthylmethylcarboxyamide)-2′-O-methyluridine, 5-(N-2-naphthylmethylcarboxyamide)-2′-deoxyuridine (2NapdU), 5-(N-2-naphthylmethylcarboxyamide)-2′-O-methyluridine, 5-(N-naphthylmethylcarboxyamide)-2′-fluorouridine, 5-(N-3,4-methylenedioxybenzylcarboxyamide)-2′-deoxyuridine (MBndU), and 5-(N-[1-(2,3-dihydroxypropyl)]carboxyamide)-2′-deoxyuridine); V is a three carbon linker and H is hexaethylene glycol linker; and at least one of positions 8, 9, 15, 16 and 17 of the nucleic acid molecule comprise a phosphorothioate linkage or moiety, wherein position 1 is the first nucleoside starting from the 5′-terminus of the nucleic acid molecule, and H and V are considered a single position for purposes of counting positions of the nucleic acid molecule. In a related aspect, Z and Z′ are independently, for each occurrence, selected from is selected from the group consisting a 5-(N-benzylcarboxyamide)-2′-deoxyuridine (BndU), 5-(N-benzylcarboxyamide)-2′-O-methyluridine, 5-(N-benzylcarboxyamide)-2′-fluorouridine, 5-(N-phenethylcarboxyamide)-2′-deoxyuridine (PedU), 5-(N-thiophenylmethylcarboxyamide)-2′-deoxyuridine (ThdU), 5-(N-isobutylcarboxyamide)-2′-deoxyuridine (iBudU), 5-(N-isobutylcarboxyamide)-2′-O-methyluridine, 5-(N-isobutylcarboxyamide)-2′-fluorouridine, 5-(N-tryptaminocarboxyamide)-2′-deoxyuridine (TrpdU), 5-(N-tryptaminocarboxyamide)-2′-O-methyluridine, 5-(N-tryptaminocarboxyamide)-2′-fluorouridine, 5-(N-[1-(3-trimethylamonium) propyl]carboxyamide)-2′-deoxyuridine chloride, 5-(N-naphthylmethylcarboxyamide)-2′-deoxyuridine (NapdU), 5-(N-naphthylmethylcarboxyamide)-2′-O-methyluridine, 5-(N-naphthylmethylcarboxyamide)-2′-fluorouridine, and 5-(N-[1-(2,3-dihydroxypropyl)]carboxyamide)-2′-deoxyuridine). In another related aspect, Z is independently, for each occurrence, selected from a 5-(N-benzylcarboxyamide)-2′-deoxyuridine (BndU) or methylenedioxybenzyl-dU. In another related aspect, Z′ is a 5-(N-naphthylmethylcarboxyamide)-2′-deoxyuridine (NapdU).

[0037] In another aspect, at least two or three of positions 8, 9, 15, 16 and 17 comprise a phosphorothioate linkage or moiety, and wherein position 1 is the first nucleoside starting from the 5′-terminus of the nucleic acid molecule, and H and V are considered a single position for purposes of counting positions of the nucleic acid molecule.

[0038] In another aspect, the nucleic acid molecule comprises at least one, two, three, four, five, six, seven or eight 2′-O-methyl nucleosides.

[0039] In another aspect, at least one of positions 3, 7, 12, 13, 18, 19, 21 and 24 of the nucleic acid molecule comprise a 2′-O-methyl modification, and wherein position 1 is the first nucleoside starting from the 5′-terminus of the nucleic acid molecule, and H and V are considered a single position for purposes of counting positions of the nucleic acid molecule. In a related aspect, at least two, three, four, five, six, seven or eight of positions 3, 7, 12, 13, 18, 19, 21 and 24 of the nucleic acid molecule comprise a 2′-O-methyl modification, and wherein position 1 is the first nucleoside starting from the 5′-terminus of the nucleic acid molecule, and H and V are considered a single position for purposes of counting positions of the nucleic acid molecule.

[0040] In another aspect, the Z is a 5-(N-benzylcarboxyamide)-2′-deoxyuridine (BndU).

[0041] In another aspect, the nucleic acid molecule comprises DNA, RNA or a combination thereof.

[0042] In another aspect, the nucleic acid molecule binds a PDGF protein with a binding affinity of less than 10 nM, less than 5 nM, less than 2 nM, or less than 1 nM. In another aspect, the nucleic acid molecule inhibits PDGF-mediated phosphorylation of a PDGF receptor.

[0043] In another aspect, the nucleic acid molecule further comprises an inverted deoxynucleotide at the 3′ terminus of the nucleic acid molecule. In a related aspect, the deoxynucleotide is a deoxythymidine.

[0044] In another aspect, the nucleic acid molecule is less sensitive to a nuclease compared to the same nucleic acid molecule without a phosphorothioate linkage or moiety. In a related aspect, the nuclease is a DNase enzyme. In yet another related aspect, the DNase enzyme is a DNase I or DNase II enzyme.

[0045] In another aspect, the nucleic acid molecule is more stable in viterous humor from New Zealand White Rabbits compared to the same nucleic acid molecule without a phosphorothioate linkage or moiety.

[0046] In another aspect, the nucleic acid molecule is selected from the group consisting of the 4149-8 aptamers having the following aptamer ID number 379, 391, 418-426, 431-437 and 453-459.

[0047] In another aspect, the nucleic acid molecule comprises seven or eight 2′-O-methyl nucleosides and four, five, six, seven or eight phosphorothioate linkages or moieties.

[0048] In another aspect, the nucleic acid molecule comprises at least one nucleotide having a phosphorothioate linkage or moiety and a 2′-O-methyl group.

[0049] In another aspect the disclosure provides for a composition comprising two nucleic acid molecules selected from the nucleic acid molecules described herein.

[0050] In another aspect, the composition is in the form selected from the group selected from a solution, a powder, a gel and an emulsion.

[0051] In another aspect, the two nucleic acid molecules are covalently linked or non-covalently linked.

[0052] In another aspect, this disclosure provides for a pharmaceutical composition comprising at least one nucleic acid molecule of any of the nucleic acid molecules described herein, and a pharmaceutically acceptable carrier.

[0053] In another aspect, the pharmaceutical composition is for intravitreal injection.

[0054] In another aspect, this disclosure provides for a method for treating macular degeneration comprising administering to a subject with macular degeneration a therapeutically effective amount of the pharmaceutical composition as described herein.

[0055] In another aspect, this disclosure provides for a method for preventing macular degeneration comprising administering to a subject at risk for developing macular degeneration a therapeutically effective amount of the pharmaceutical composition as described herein.

[0056] In another aspect, this disclosure provides for a method for treating an ophthalmic condition comprising administering to a subject with an ophthalmic condition a therapeutically effective amount of the pharmaceutical composition as described herein. In a related aspect, the ophthalmic condition is selected from the group consisting of retinitis, macular degeneration, choroiditis, retinopathy, hypertensive retinopathy, diabetic retinopathy, chronic dry eye, AIDS-related vision loss, amblyopia, hemianopia, retinal vein occlusions, trachoma, keratoconus, chorioretinal inflammation, central serous retinopathy, uveitis, retinal dystrophy, edema, glaucoma, and cataract.

[0057] In another aspect, the macular degeneration is age-related macular degeneration. In a related aspect, the macular degeneration is dry age-related macular degeneration or wet age-related macular degeneration.

[0058] In another aspect, this disclosure provides for a method for treating fibrosis comprising administering to a subject with fibrosis a therapeutically effective amount of the pharmaceutical composition as described herein. In a related aspect, the fibrosis is selected from pulmonary fibrosis, renal fibrosis, and cystic fibrosis.

[0059] In another aspect, this disclosure provides for a method for treating a cardiovascular disease comprising administering to a subject with the cardiovascular disease a therapeutically effective amount of the pharmaceutical composition as described herein. In a related aspect, the cardiovascular disease is selected from atherosclerosis, restenosis, a cardiac hypertrophy related condition, and a vascular disorder.

[0060] In another aspect, this disclosure provides for a method for treating cancer comprising administering to a subject with cancer a therapeutically effective amount of the pharmaceutical composition as described herein. In a related aspect, the cancer is selected from bladder cancer, lung cancer, breast cancer, melanoma, colon and rectal cancer, lymphoma, endometrial cancer, pancreatic cancer, liver cancer, renal cancer, prostate cancer, leukemia, and thyroid cancer.

[0061] In another aspect, this disclosure provides for a nucleic acid molecule comprising the nucleic sequence: 5′-C¹-G-A-C^{1,2}-A-G¹-C¹-A-Z²-G²-Z²-A²-Z-G¹-C -A¹-C¹-A¹-Z-C¹-Z¹-3′ (SEQ ID NO: 833), wherein, C¹ is independently, for each occurrence, selected from the group consisting of a cytidine, a deoxycytidine and a 2′-O-methylcytidine; C^{1,2} is independently, for each occurrence, selected from the group consisting of a cytidine, a cytidine comprising a phosphorothioate linkage, a deoxycytidine, a deoxycytidine comprising a phosphorothioate linkage, a 2′-O-methylcytidine and a 2′-O-methylcytidine comprising a phosphorothioate linkage; G¹ is independently, for each occurrence, selected from the group consisting of a guanosine, a deoxyguanosine and a 2′-O-methylguanosine; G² is independently, for each occurrence, selected from the group consisting of a guanosine, a guanosine comprising a phosphorothioate linkage, a deoxyguanosine and a deoxyguanosine comprising a phosphorothioate linkage; Z is independently, for each occurrence, selected from the group consisting of a uridine, a deoxyuridine and a 5-(N-naphthylmethylcarboxyamide)-2′-deoxyuridine (NapdU); Z¹ is independently, for each occurrence, selected from the group consisted of a uridine, a deoxyuridine, a 2′-O-methyluridine, a 5-(N-naphthylmethylcarboxyamide)-2′-deoxyuridine (NapdU) and a 5-(N-naphthylmethylcarboxyamide)-2′-deoxyuridine (NapdU) comprising a 2′-O-methyl group; Z² is independently, for each occurrence, selected from the group consisted of a uridine, a uridine comprising a phosphorothioate linkage, a deoxyuridine, a deoxyuridine comprising a phosphorothioate linkage, a 5-(N-naphthylmethylcarboxyamide)-2′-deoxyuridine (NapdU) and a 5-(N-naphthylmethylcarboxyamide)-2′-deoxyuridine (NapdU) comprising a phosphorothioate linkage; A¹ is independently, for each occurrence, selected from the group consisting of an adenosine, a deoxyadenosine and a 2′-O-methyladenosine; A² is independently, for each occurrence, selected from the group consisting of an adenosine, an adenosine comprising a phosphorothioate linkage, a deoxyadenosine and a deoxyadenosine comprising a phosphorothioate linkage; and wherein, the nucleic acid molecule comprises at least one, two, three, four or five phosphorothioate linkages.

[0062] In a related aspect, C¹ is a 2′-O-methylcytidine. In a related aspect, C^{1,2} is a 2′-O-methylcytidine comprising a phosphorothioate linkage. In a related aspect, G¹ is a 2′-O-methylguanosine. In a related aspect, G² is a deoxyguanosine comprising a phosphorothioate linkage. In a related aspect, Z¹ is a 5-(N-naphthylmethylcarboxyamide)-2′-deoxyuridine (NapdU) comprising a 2′-O-methyl group. In a related aspect, Z² is a 5-(N-naphthylmethylcarboxyamide)-2′-deoxyuridine (NapdU) comprising a phosphorothioate linkage. In a related aspect, A¹ is a 2′-O-methyladenosine. In a related aspect, A² is a deoxyadenosine comprising a phosphorothioate linkage.

[0063] In another aspect, this disclosure provides for a nucleic acid molecule comprising the nucleic sequence: 5′-C¹-C-G-Z-Z-C¹-A-A-G¹-Z-G-C¹-Z-Z-G¹-Z-A¹-G¹-G-A-Z-Z¹-Z-A²-A²-A²-Z-G¹-G¹-3′ (SEQ ID NO: 834) wherein, C¹ is independently, for each occurrence, selected from the group consisting of a cytidine, a deoxycytidine and a 2′-O-methylcytidine; G¹ is independently, for each occurrence, selected from the group consisting of a guanosine, a deoxyguanosine and a 2′-O-methylguanosine; G¹ is independently, for each occurrence, selected from the group consisting of a guanosine, a deoxyguanosine and a 2′-O-methylguanosine; Z is independently, for each occurrence, selected from the group consisted of a uridine, a deoxyuridine and a 5-(N-naphthylmethylcarboxyamide)-2′-deoxyuridine (NapdU); Z¹ is independently, for each occurrence, selected from the group consisted of a uridine, a deoxyuridine, a 2′-O-methyluridine, a 5-(N-naphthylmethylcarboxyamide)-2′-deoxyuridine (NapdU) and a 5-(N-naphthylmethylcarboxyamide)-2′-deoxyuridine (NapdU) comprising a 2′-O-methyl group; A¹ is independently, for each occurrence, selected from the group consisting of an adenosine, a deoxyadenosine and a 2′-O-methyladenosine; A² is independently, for each occurrence, selected from the group consisting of an adenosine, an adenosine comprising a phosphorothioate linkage, a deoxyadenosine and a deoxyadenosine comprising a phosphorothioate linkage; and wherein, the nucleic acid molecule comprises at least one, two, three, four or five phosphorothioate linkages.

[0064] In a related aspect, C¹ is a 2′-O-methylcytidine. In a related aspect, G¹ is a 2′-O-methylguanosine. In a related aspect, Z is a 5-(N-naphthylmethylcarboxyamide)-2′-deoxyuridine (NapdU). In a related aspect, Z¹ is a 5-(N-naphthylmethylcarboxyamide)-2′-deoxyuridine (NapdU) comprising a 2′-O-methyl group. In a related aspect, A¹ is a 2′-O-methyladenosine. In a related aspect, A² is a deoxyadenosine comprising a phosphorothioate linkage.

[0065] In another aspect, this disclosure provides for a nucleic acid molecule comprising the nucleic sequence: 5′-Z-Z″-A¹-C-H-G-Z¹-Z²-A²-C-V-C¹-G¹-C-G²-Z′²-Z²-Z¹-A¹-Z-A-G-C-G¹-3′ (SEQ ID NO: 835) wherein, C¹ is independently, for each occurrence, selected from the group consisting of a cytidine, a deoxycytidine and a 2′-O-methylcytidine; G¹ is independently, for each occurrence, selected from the group consisting of a guanosine, a deoxyguanosine and a 2′-O-methylguanosine; G² is independently, for each occurrence, selected from the group consisting of a guanosine, a guanosine comprising a phosphorothioate linkage, a deoxyguanosine and a deoxyguanosine comprising a phosphorothioate linkage; Z is independently, for each occurrence, selected from the group consisting of a uridine, a deoxyuridine, a 5-(N-naphthylmethylcarboxyamide)-2′-deoxyuridine (NapdU), a 5-(N-2-naphthylmethylcarboxyamide)-2′-deoxyuridine (2NapdU), a 5-(N-benzylcarboxyamide)-2′-deoxyuridine (BndU) and a 5-(N-3,4-methylenedioxybenzylcarboxyamide)-2′-deoxyuridine (MBndU); Z″ is independently, for each occurrence, selected from the group consisting of a uridine, a deoxyuridine, a 5-(N-benzylcarboxyamide)-2′-deoxyuridine (BndU) and a 5-(N-3,4-methylenedioxybenzylcarboxyamide)-2′-deoxyuridine (MBndU); Z′² is independently, for each occurrence, selected from the group consisted of a uridine, a uridine comprising a phosphorothioate linkage, a deoxyuridine, a deoxyuridine comprising a phosphorothioate linkage, a 5-(N-benzylcarboxyamide)-2′-deoxyuridine (BndU), a 5-(N-benzylcarboxyamide)-2′-deoxyuridine (BndU) comprising a phosphorothioate linkage, a 5-(N-2-naphthylmethylcarboxyamide)-2′-deoxyuridine (2NapdU), a 5-(N-2-naphthylmethylcarboxyamide)-2′-deoxyuridine (2NapdU) comprising a phosphorothioate linkage, a 5-(N-naphthylmethylcarboxyamide)-2′-deoxyuridine (NapdU) and a 5-(N-naphthylmethylcarboxyamide)-2′-deoxyuridine (NapdU) comprising a phosphorothioate linkage; Z¹ is independently, for each occurrence, selected from the group consisting of a uridine, a deoxyuridine, a 2′-O-methyluridine, a 5-(N naphthylmethylcarboxyamide)-2′-deoxyuridine (NapdU), a 5-(N-naphthylmethylcarboxyamide)-2′-deoxyuridine (NapdU) comprising a 2′-O-methyl group, a 5-(N-benzylcarboxyamide)-2′-deoxyuridine (BndU), a 5-(N-benzylcarboxyamide)-2′-deoxyuridine (BndU) comprising a 2′-O-methyl group, a methylenedioxybenzyl-dU and a methylenedioxybenzyl-dU comprising a 2′-O-methyl group; Z² is independently, for each occurrence, selected from the group consisting of a uridine, a uridine comprising a phosphorothioate linkage, a deoxyuridine, a deoxyuridine comprising a phosphorothioate linkage, a 5-(N-naphthylmethylcarboxyamide)-2′-deoxyuridine (NapdU) and a 5-(N-naphthylmethylcarboxyamide)-2′-deoxyuridine (NapdU) comprising a phosphorothioate linkage, a 5-(N-benzylcarboxyamide)-2′-deoxyuridine (BndU), a 5-(N-benzylcarboxyamide)-2′-deoxyuridine (BndU) comprising a phosphorothioate linkage, a methylenedioxybenzyl-dU and a methylenedioxybenzyl-dU comprising a phosphorothioate linkage; A¹ is independently, for each occurrence, selected from the group consisting of an adenosine, a deoxyadenosine and a 2′-O-methyladenosine; A² is independently, for each occurrence, selected from the group consisting of an adenosine, an adenosine comprising a phosphorothioate linkage, a deoxyadenosine and a deoxyadenosine comprising a phosphorothioate linkage; V is a three carbon linker; H is hexaethylene glycol linker; and wherein, the nucleic acid molecule comprises at least one, two, three, four or five phosphorothioate linkages.

[0066] In a related aspect, C¹ is a 2′-O-methylcytidine. In a related aspect, G¹ is a 2′-O-methylguanosine. In a related aspect, G² is a deoxyguanosine comprising a phosphorothioate linkage. In a related aspect, Z is a 5-(N-benzylcarboxyamide)-2′-deoxyuridine (BndU). In a related aspect, Z′² is a 5-(N-naphthylmethylcarboxyamide)-2′-deoxyuridine (NapdU) comprising a phosphorothioate linkage. In a related aspect, In a related aspect, Z¹ is a 5-(N-benzylcarboxyamide)-2′-deoxyuridine (BndU) comprising a 2′-O-methyl group. In a related aspect, Z² is a 5-(N-benzylcarboxyamide)-2′-deoxyuridine (BndU) comprising a phosphorothioate linkage. In a related aspect, A¹ is a 2′-O-methyladenosine. In a related aspect, A² is a deoxyadenosine comprising a phosphorothioate linkage.

[0067] In another aspect, this disclosure provides for a composition comprising two nucleic acid molecules selected from the group consisting of any one of the nucleic acid molecules described herein.

[0068] In a related aspect, the composition is in the form selected from the group selected from a solution, a powder, a gel and an emulsion.

[0069] In a related aspect, the two nucleic acid molecules are covalently linked or non-covalently linked.

[0070] In another aspect, the nucleic acid molecule inhibits PDGF-mediated phosphorylation of a PDGF receptor.

[0071] In another aspect, this disclosure provides for a pharmaceutical composition comprising at least one nucleic acid molecule described herein and a pharmaceutically acceptable carrier.

[0072] In a related aspect, the pharmaceutical composition is for intravitreal injection.

[0073] In another aspect, this disclosure provides for a method for treating macular degeneration comprising administering to a subject with macular degeneration a therapeutically effective amount of the pharmaceutical composition comprising at least one nucleic acid molecule described herein and a pharmaceutically acceptable carrier.

[0074] In another aspect, this disclosure provides for a method for preventing macular degeneration comprising administering to a subject at risk for developing macular degeneration a therapeutically effective amount of the pharmaceutical composition comprising at least one nucleic acid molecule described herein and a pharmaceutically acceptable carrier.

[0075] In another aspect, this disclosure provides for a method for treating an ophthalmic condition comprising administering to a subject with an ophthalmic condition a therapeutically effective amount of the pharmaceutical composition comprising at least one nucleic acid molecule described herein and a pharmaceutically acceptable carrier.

[0076] In a related aspect, the ophthalmic condition is selected from the group consisting of retinitis, macular degeneration, choroiditis, retinopathy, hypertensive retinopathy, diabetic retinopathy, chronic dry eye, AIDS-related vision loss, amblyopia, hemianopia, retinal vein occlusions, trachoma, keratoconus, chorioretinal inflammation, central serous retinopathy, uveitis, retinal dystrophy, edema, glaucoma, and cataract.

[0077] In a related aspect, the macular degeneration is age-related macular degeneration.

[0078] In a related aspect, the macular degeneration is dry age-related macular degeneration or wet age-related macular degeneration.

[0079] In another aspect, this disclosure provides for a method for treating fibrosis comprising administering to a subject with fibrosis a therapeutically effective amount of the pharmaceutical composition comprising at least one nucleic acid molecule described herein and a pharmaceutically acceptable carrier.

[0080] In a related aspect, the fibrosis is selected from pulmonary fibrosis, renal fibrosis, and cystic fibrosis.

[0081] In another aspect, this disclosure provides for a method for treating a cardiovascular disease comprising administering to a subject with the cardiovascular disease a therapeutically effective amount of the pharmaceutical composition comprising at least one nucleic acid molecule described herein and a pharmaceutically acceptable carrier.

[0082] In a related aspect, the cardiovascular disease is selected from atherosclerosis, restenosis, a cardiac hypertrophy related condition, and a vascular disorder.

[0083] In another aspect, this disclosure provides for a method for treating cancer comprising administering to a subject with cancer a therapeutically effective amount of the pharmaceutical composition comprising at least one nucleic acid molecule described herein and a pharmaceutically acceptable carrier.

[0084] In a related aspect, the cancer is selected from bladder cancer, lung cancer, breast cancer, melanoma, colon and rectal cancer, lymphoma, endometrial cancer, pancreatic cancer, liver cancer, renal cancer, prostate cancer, leukemia, and thyroid cancer.

[0085] In a related aspect, anyone of the nucleic acid molecule described herein is an aptamer.

[0086] In another aspect, the present disclosure provides methods for preventing, treating, and/or ameliorating a disease or condition mediated by PDGF and/or VEGF. In some embodiments, a method comprises administering a PDGF aptamer, a VEGF aptamer, and/or a VEGF/PDGF-B aptamer construct, or pharmaceutical compositions comprising any of these, to a subject, such as a mammal. In some embodiments, the subject is a human. Specifically, methods for treating, preventing, and/or ameliorating fibrosis, atherosclerosis, macular degeneration, diabetic retinopathy, and/or cancer are provided. In some embodiments, a disease or condition mediated by PDGF and/or VEGF is one in which PDGF and/or VEGF activity may directly or indirectly contribute to the disease or condition. Such diseases or conditions include, but are not limited to, fibrosis, atherosclerosis, macular degeneration, diabetic retinopathy, and cancer. In some embodiments, the disease or condition to be treated, prevented, and/or ameliorated is age-related macular degeneration (AMD), diabetic retinopathy, or other ocular diseases, such as glaucoma, chronic dry eye, AIDS-related vision loss, amblyopia, hemianopia, retinal vein occlusions, trachoma, keratoconus, chorioretinal inflammation, central serous retinopathy, uveitis, retinitis, hypertensive retinopathy, retinal dystrophy, etc. In some embodiments, the disease or condition to be treated, prevented, and/or ameliorated is renal fibrosis or renal cancer.

[0087] In some embodiments, aptamers and aptamer constructs disclosed herein have potential applications ranging from biomarker discovery and diagnostics (Ostroff, R. M., et al. (2010) PLoS One 5:e15003; Mehan, M., et al. (2012) PLoS One 7:e35157) to histochemistry and imaging (Gupta, S., et al. (2011) Appl. Immunohistochem. Mol. Morphol. 19:273).

[0088] In some embodiments, a therapeutic effect (e.g., treating, preventing, and/or ameliorating fibrosis, atherosclerosis, macular degeneration, or cancer, etc.) may be achieved by administering a PDGF aptamer, a VEGF aptamer, and/or a PDGFNEGF aptamer construct such that the aptamer or aptamer construct is exposed to, and can bind to, PDGF and/or VEGF. In some embodiments, such binding occurs regardless of the method of delivery of the aptamer to the subject being treated. In some embodiments, the therapeutic effect may be achieved by administering the PDGF aptamer, VEGF aptamer, or PDGFNEGF aptamer construct such that it is exposed to, and binds to, PDGF and/or VEGF and prevents or reduces the binding of PDGF and/or VEGF to one or more cell receptors.

[0089] In some embodiments, the binding of a PDGF aptamer to PDGF-BB or PDGF-AB interferes with the binding of PDGF-BB or PDGF-AB to the PDGF-α receptor. In some embodiments, the binding of a PDGF aptamer to PDGF-BB or PDGF-AB interferes with the binding of PDGF-BB or PDGF-AB to the PDGF-β receptor. In some embodiments, a PDGF aptamer to PDGF-BB or PDGF-AB reduces phosphorylation of a PDGF receptor (such as PDGF-α receptor and/or PDGF-β receptor).

[0090] In some embodiments, the binding of a VEGF aptamer to VEGF-121, VEGF-110, VEGF-165, VEGF-189, or another alternatively spliced or functionally-active proteolytic fragment of VEGF interferes with the binding of the growth factor to VEGFR-1 (Flt-1). In some embodiments, the binding of a VEGF aptamer to VEGF-121, VEGF-110, VEGF-165, VEGF-189, or another alternatively spliced or functionally-active proteolytic fragment of VEGF, interferes with the binding of the growth factor to VEGFR-2 (KDR). In some embodiments, a VEGF aptamer reduces phosphorylation of a VEGF receptor (such as VEGF-1 receptor and/or VEGF-1 receptor).

[0091] In some embodiments, a PDGFNEGF aptamer construct reduces the level of phosphorylation of a PDGF receptor (such as PDGF-α receptor and/or PDGF-3 receptor) and reduces the level of phosphorylation of a VEGF receptor (such as VEGFR-1 and/or VEGFR-2). In some embodiments, a PDGF aptamer, a VEGF aptamer, or a PDGFNEGF aptamer construct reduces signaling along the signal transduction pathway of a PDGF receptor and/or a VEGF receptor.

[0092] In some embodiments, a PDGF aptamer, a VEGF aptamer, or a PDGF/VEGF aptamer construct is administered with one or more additional active agents. Such administration may be sequential or in combination.

[0093] In some embodiments, an in vitro diagnostic method comprises contacting a PDGF aptamer with a sample suspected of comprising PDGF. In some embodiments, an in vivo diagnostic method comprises administering a suitably labeled PDGF aptamer to an individual suspected of having a PDGF-mediated disease or disorder, wherein the labeled PDGF aptamer is detected for the purpose of diagnosing or evaluating the health status of the individual. The label used may be selected in accordance with the imaging modality to be used.

[0094] In some embodiments, an in vitro diagnostic method comprises contacting a VEGF aptamer with a sample suspected of comprising VEGF. In some embodiments, an in vivo diagnostic method comprises administering a suitably labeled VEGF aptamer to an individual suspected of having VEGF-mediated disease or disorder, wherein the labeled VEGF aptamer is detected for the purpose of diagnosing or evaluating the health status of the individual. The label used may be selected in accordance with the imaging modality to be used.

[0095] In some embodiments, an in vitro diagnostic method comprises contacting a PDGFNEGF aptamer construct with a sample suspected of comprising PDGF and/or VEGF. In another aspect, the present disclosure provides an in vivo diagnostic method comprising obtaining a suitably labeled PDGFNEGF aptamer construct, injecting the labeled PDGF/VEGF aptamer construct into an individual suspected of having a PDGFNEGF-mediated disease or disorder, and detecting the labeled PDGFNEGF aptamer construct for the purpose of diagnosing or evaluating the health status of the individual. The label used may be selected in accordance with the imaging modality to be used.

[0096] In some embodiments, the present invention provides aptamer constructs comprising a PDGF aptamer and a VEGF aptamer.

[0097] In some embodiments, the present disclosure provides an aptamer that efficiently binds to a protein predominantly through hydrophobic interactions.

[0098] In some embodiments, the present disclosure provides an aptamer-protein complex, wherein the aptamer binds to the protein substantially through hydrophobic interactions.

[0099] In some embodiments, the present disclosure provides an aptamer capable of forming a co-crystal complex with a protein target, wherein the complex comprises fewer than 7 hydrogen bonds.

[0100] In some embodiments, the present disclosure provides an aptamer capable of forming a co-crystal complex with a protein target, wherein the complex comprises a pseudoknot domain involving 16 nucleotides or less.

[0101] In some embodiments, the present disclosure provides an aptamer capable of binding to a protein target, wherein the aptamer binds to the protein target with less than or equal to 1 polar contact per 100 Å² of interface area, wherein the polar contact comprises one or more hydrogen bonds and one or more charge-charge interactions, and wherein the interface area is a fraction of the protein surface area occupied by the aptamer.

[0102] In another aspect, this disclosure provides for a nucleic acid molecule comprising the nucleic sequence: 5′-C-C-G-Z-Z-C¹-A-A-G¹-Z-G-C¹-Z-Z-G¹-Z-A¹-G¹-G-A-Z-Z¹-Z-A²-A²-A²-Z-G¹-G¹-3′ (SEQ ID NO: 836) wherein, C¹ is independently, for each occurrence, selected from the group consisting of a cytidine, a deoxycytidine and a 2′-O-methylcytidine; G¹ is independently, for each occurrence, selected from the group consisting of a guanosine, a deoxyguanosine and a 2′-O-methylguanosine; Z is independently, for each occurrence, selected from the group consisted of a uridine, a deoxyuridine and a 5-(N-naphthylmethylcarboxyamide)-2′-deoxyuridine (NapdU); Z¹ is independently, for each occurrence, selected from the group consisted of a uridine, a deoxyuridine, a 2′-O-methyluridine, a 5-(N-naphthylmethylcarboxyamide)-2′-deoxyuridine (NapdU) and a 5-(N-naphthylmethylcarboxyamide)-2′-deoxyuridine (NapdU) comprising a 2′-O-methyl group; A¹ is independently, for each occurrence, selected from the group consisting of an adenosine, a deoxyadenosine and a 2′-O-methyladenosine; A² is independently, for each occurrence, selected from the group consisting of an adenosine, an adenosine comprising a phosphorothioate linkage, a deoxyadenosine and a deoxyadenosine comprising a phosphorothioate linkage; and wherein, the nucleic acid molecule comprises at least one, two, three, four or five phosphorothioate linkages.

[0103] In a related aspect, C¹ is a 2′-O-methylcytidine. In a related aspect, G¹ is a 2′-O-methylguanosine. In a related aspect, Z is a 5-(N-naphthylmethylcarboxyamide)-2′-deoxyuridine (NapdU). In a related aspect, Z¹ is a 5-(N-naphthylmethylcarboxyamide)-2′-deoxyuridine (NapdU) comprising a 2′-O-methyl group. In a related aspect, A¹ is a 2′-O-methyladenosine. In a related aspect, A² is a deoxyadenosine comprising a phosphorothioate linkage.

### BRIEF DESCRIPTION OF THE DRAWINGS

[0104] FIG. 1A shows determination of K_{d} values for three slow off rate modified aptamers and aptamer E10030. FIG. 1B shows inhibition of PDGF-BB-stimulated phosphorylation of PDGFRβ by three PDGF aptamers described herein and a scrambled control oligonucleotide. FIGS. 1C and 1D show the K_{d} ratios for modified aptamers versus the parent aptamer, and aptamer 4149-8_130, in which a particular Bn-dU nucleobase has been replaced by another modified dU nucleobase, relative to the parent aptamer (a value of 1 indicates the modified aptamer inhibits phosphorylation of PDGFRβ equally as well as the parent, while a value>1 indicates the modified aptamer has less potent inhibitory activity compared to the parent).

[0105] FIG. 2A shows a table of aptamer 4149-8_260 intramolecular contacts and aptamer-PDGF contacts. FIG. 2B shows a representation of nonpolar intramolecular and aptamer-PDGF contacts; and FIG. 2C shows a representation of polar intramolecular and aptamer-PDGF contacts; as described in Example 2. Hydrophobic (nonpolar) interactions include π-π interactions (both face-to-face and edge-to-face aromatic interactions) and van der Waals contact (vW). Polar interactions include hydrogen bonds (dashed lines) and charge-charge interactions (solid lines). Certain aptamer residues (e.g., dC4, dG6, dA9, dC10, dC12, dG13, dC14, dG15, dG22, dC23 and 2′-O-methyl G24) participate in canonical base pairing and base stacking, as shown in B and C, and 2′-O-methyl A11 is extruded.

[0106] FIG. 3A shows the consensus sequence for a set of clones from the SELEX pool as determined by 454 pyrosequencing and nucleotide frequency at each position, and the sequences for six of the clones; and FIG. 3B shows K_{d} values for modified aptamers based on parent aptamer 4149-8, which were modified as shown, as described in Example 1.

[0107] FIG. 4 illustrates certain stereoviews of a PDGF-BB: 4149-8_260 complex, as described in Example 2.

[0108] FIG. 5A shows binding affinity of various aptamers for different PDGF dimeric isoforms, in the presence and absence of 200 nM tRNA; and FIG. 5B shows an alignment of the amino acid sequences for the mature forms of PDGF-A, -B, -C and -D; as described in Example 3. Amino acid residues for PDGF-A that are shown in bold are involved in propeptide binding, and amino acid residues for PDGF-B that are shown in bold are involved in PDGFRβ binding (Shim et al, (2010) Proc. Natl. Acad. Sci. USA 107(25):11307). Box shading indicates residues involved in aptamer 4149-8_260 binding to PDGF-B chain 1 (dark shading), and PDGF-B chain 2 (light shading).

[0109] FIG. 6A shows the K_{d} ratio for modified aptamers made by substituting each indicated position in aptamer 4149-8_38 (SED ID NO: 38) with a three-carbon C-3 linker, and K_{d} values for PDGF-BB binding, PDGF-AB binding, as well as cellular IC₅₀ for five modified aptamers based on parent aptamer 4149-8; and FIG. 6B shows K_{d} ratios for modified aptamers based on parent aptamer 4149-8_130 (SEQ ID NO: 130), in which a particular Bn-dU nucleobase has been replaced by another modified dU nucleobase, relative to the parent aptamer (numbers<1 indicate the modified aptamer has greater affinity than the parent aptamer, and numbers>1 indicate the modified aptamer has lower affinity than the parent aptamer); as described in Example 1.

[0110] FIG. 7A shows a ribbon diagram of the PDGF-BB homodimer bound to aptamer 4149-8_260 (SEQ ID NO: 211); and FIG. 7B shows a schematic representation and structural representation of the aptamer conformation when bound to a PDGF-B subunit; as described in Example 2. Non-canonical base pairs are coded based on the nomenclature of Leontis and Westhof (Leontis N. B. et al. (2003) Curr. Opin. Struct. Biol. 13(3):300). Dark gray=PDGF-B Chain 1; Light gray=PDGF-B Chain 2; Bn=Bn-dU, Pe=Pe-dU, Th=Th-dU.

[0111] FIGS. 8A-8L illustrate certain structural features of the PDGF aptamer from the crystal structure of the PDGF-BB: 4149-8_260 aptamer complex, as described in Example 2. FIG. 8A illustrates the aptamer structure, showing domains, basepairing and stacking interactions. The stems of the miniknot deviate significantly from B-form DNA due to substantial buckling and propeller angles as well as helical underwinding. Bn20 is the hinge that interfaces with the 5′ stem through stacking with U8. FIG. 8B illustrates Stem 1 (S1) end view. FIG. 8C illustrates S1 and L2 side views. The modified nucleotides form a hydrophobic cluster with Bn2, Bn7 and Bn8 from the 5′ stem interacting with Bn16, Pe17, Th18 and Bn20 from the miniknot. Bn8 makes edge-to-face π-π interactions with Bn16 and Bn20. The non-canonical dU-dU base pair utilizes H-bonding to the amide linker of Bn20. FIG. 8D illustrates the details of the non-canonical base pair between Pe-dU17 and Bn-dU20. FIG. 8E illustrates aromatic interactions stabilizing the base of miniknot S1. FIG. 8F illustrates a base triple which is formed between the C10-G15 Watson-Crick pair in the S1 and L2 nucleotide, A21. The Leontis-Westhof classification of this base triple is cis Watson-Crick/Watson-Crick, trans Sugar edge/Hoogsteen (Leontis N. B. et al. (2003) Curr. Opin. Struct. Biol. 13:300). The base triple is not planar as there is a 34° propeller twist angle between A21 and G15 as well as considerable buckling and propeller twisting between the Watson-Crick base pair (Table 5). FIG. 8G illustrates residue mA11, the single extruded base in L1 and the backbone turn. FIG. 8H illustrates an axial view of 52. FIG. 8I illustrates an axial view of the 5′ stem motif which highlights the significant deviation from B-form DNA. The global C1′-C1′ helical parameters indicate the dU-dU pair is overtwisted (400) resulting in a ˜124° bend in the backbone which flattens to near linear (˜172°) between Bn-dU1 and Bn-dU2. The significant radial displacement between Bn-dU7-Bn-dU8 and near zero displacement between Bn-dU2-dA3 results in greater stacking overlap between bases 2-4 and 6-7. FIG. 8J which illustrates the non-canonical base pair between Bn-dU2 and Bn-dU8. FIG. 8K illustrates the interdomain junction formed by modified nucleotides. FIG. 8L illustrates Bn8 making edge-to-face π-π interactions with Bn16 and Bn20 that define the topology of the interdomain junction. The deleterious impact of substituting Bn-dU at position 8 of aptamer 4149-8_260 (SEQ ID NO: 211) with an iB-dU (SEQ ID NO: 255) is evident in the space-filling images shown in FIG. 8M and FIG. 8N. Bn8 (FIG. 8M) is capable of making energetically favorable π-π interactions with neighboring aromatic groups and allows the SOMAmer to pack more tightly. In contrast, iB8 (FIG. 8N) is not aromatic and thus lacks the ability for π-stacking interactions with neighboring aromatic groups. Additionally, the iB group is not as large and leaves a hole in the middle of the hydrophobic cluster.

[0112] FIGS. 9A-9H illustrate certain protein-aptamer interactions, as described in Example 2. In FIG. 9A, Bn-dU1 occupies a pocket under a salt bridge at the homodimer interface. The U1 base makes hydrogen bonds to the protein backbone at Val39 while the benzyl ring is sandwiched between the aliphatic side chain of Arg 56 and the disulfide bond of Cys43-Cys52. In FIG. 9B, Bn2 has an edgewise interaction with Trp40 and is nestled between the methylene side chains of Asn55 and Leu38. FIG. 9C illustrates that the aromatic ring of Bn7 tucks up against the aliphatic portions of Asn54 and Asn55 side chains. FIG. 9D illustrates that the Leu38 and Ile75 side chains present a hydrophobic surface for the benzyl ring of Bn-dU8 to contact the protein. FIG. 9E illustrates that Bn16 has edge-to-faceπ-stacking with Trp40 and van der Waals contact with the aliphatic region of Arg73. FIG. 9F illustrates that Pe17 is surrounded by the hydrophobic side chains of Leu38, Trp40, Arg73 and Ile75. Arg73 makes a hydrogen bond to the amide linker of Pe-dU17 and a charge-charge interaction with the aptamer backbone. FIG. 9G illustrates Th18 encircled by the hydrophobic side chains of Arg73, Ile75 and Phe84. FIG. 9H illustrates that stacking interactions between the protein and the aptamer are present between Pro82 and Bn20 and U8, and Phe84 makes edge-to-face contact with U20. Bn20 makes additional hydrophobic contact to Ile77 and Lys80.

[0113] FIG. 10A shows the six co-crystal structures of traditional aptamers (PDB IDs: vWF, 3HXO; Thrombin, 3QLP; GlnRs tRNA, 1EXD; Human IgG, 3AGV; MS2 coat protein, 6MSF; NF-kB, 1OOA) that were analyzed for the number of polar contacts (hydrogen bonds plus charge-charge interactions), and the contact surface area. The results are plotted versus the reported binding affinities for these six aptamer-target complexes (dark gray bars) and for three SOMAmers (light gray bars) including the PDGF-SL5 (4149-8_260) complex and two unpublished SOMAmer-target structures. The relationship between the number of polar contacts and the contact surface area for the six traditional aptamers was analyzed by linear regression, and the 99% confidence interval is indicated by the gray shading on the floor of the figure. FIG. 10B illustrates shape complementarity of the PDGF-SOMAmer complex as exhibited by Pe-dU17 and Th-dU18. Left, PDGF chain 1 is shown as a dark gray surface, Pe-dU17 and Th-dU18 are shown as space-filling representations. Right, same view as left panel, except Pe-dU17 is shown as stick representation. FIG. 10C illustrates detail of Bn-dU1 interaction with PDGF, with PDGF chain 1 shown as a dark gray surface, PDGF chain 2 shown as a light gray surface, and Bn-dU1 shown as a space-filling representation.

[0114] FIGS. 11A-11C show a comparison of SL5 and PDGFRβ binding to PDGF-BB. FIG. 11A receptor co-crystal showing PDGF homodimer (chain 1, medium gray; chain 2, light gray) and receptor extracellular domain colored dark gray (from Shim, A. H., et al. (2010) Proc. Natl. Acad. Sci. USA 107(25):11307). FIG. 11B complex of PDGF homodimer (chain 1, medium gray; chain 2, light gray) and SL5 (dark gray). FIG. 11C shows the amino acid sequence of the PDGF-B mature form. Box shading indicates contact residues to 4149-8_260, PDGFRβ or both. PDGF residues that make a 4 Å contact with 4149-8_260, but do not contact PDGFRβ are boxed with no shading. PDGF residues that make 4 Å contact with PDGFRβ, but do not contact 4149-8_260 are boxed with dark gray shading. PDGF residues that make 4 Å contact with both 4149-8_260 and PDGFRβ are boxed with medium gray shading.

[0115] FIG. 12 illustrates certain exemplary C-5 pyrimidine modifications that may be incorporated into aptamers, such as slow off-rate aptamers.

[0116] FIG. 13 shows a representative plot of the inhibition of PDGF-BB-induced PDGF Rβ phosphorylation in Hs27 fibroblasts with SOMAmers 4149-8_379 (labeled as OH-4149-8_379) or 5′ amino-linker modified SOMAmer 4149-8_379 (labeled as N-4149-8_379), as described in Example 4.

[0117] FIG. 14 shows the consensus sequence for a set of PDGF-binding clones from the SELEX pool as determined by 454 pyrosequencing and nucleotide frequency at each position, as described in Example 5.

[0118] FIG. 15 shows K_{d} ratios for modified aptamers based on parent aptamer 4867-31_143, in which a particular Nap-dU nucleobase has been replaced by another modified dU nucleobase, relative to the parent aptamer (numbers<1 indicate the modified aptamer has greater affinity than the parent aptamer, and numbers>1 indicate the modified aptamer has lower affinity than the parent aptamer); as described in Example 7.

[0119] FIG. 16 shows the consensus sequence for a set of VEGF-binding clones from the SELEX pool as determined by 454 pyrosequencing and nucleotide frequency at each position, as described in Example 7.

[0120] FIG. 17 shows percent VEGFR2 phosphorylation in human umbilical vein endothelial cells (HUVECs) stimulated with VEGF-121 or VEGF-165 and VEGF aptamers 4867-31_43 and 4867-31_192, as described in Example 9.

[0121] FIG. 18A shows inhibition of PDGF-induced PDGF Rβ phosphorylation in Hs27 fibroblasts with PDGF aptamer 4149-8_379 (open circles) and PDGFNEGF aptamer construct 4149-8_401 (closed circles); and FIG. 18B shows inhibition of VEGF-induced VEGF R2 phosphorylation in HUVECs with VEGF aptamer 4867-31_192 (open circles) and PDGFNEGF aptamer construct 4149-8_401 (closed circles); as described in Example 11.

[0122] FIGS. 19A-B show simultaneous binding of PDGF and VEGF by PDGFNEGF aptamer construct SL1012 (20 kDa PEG-N-4149-8_401) on microtiter plates coated with the VEGF with addition of biotinylated PDGF (FIG. 19A), and microtiter plates coated with PDGF with the addition of biotinylated VEGF (FIG. 19B), as described in Example 12.

[0123] FIGS. 20A-B show simultaneous binding of PDGF and VEGF by PDGFNEGF aptamer constructs SL1012 (20 kDa PEG-N-4149-8_401) (FIG. 20A) and SL1013 (40 kDA PEG-N-4149-8-401) (FIG. 20B), on microtiter plates that were coated with PDGF with the addition of biotinylated VEGF, as described in Example 12.

[0124] FIGS. 21A-B show the simultaneous binding of PDGF and VEGF by various PDGFNEGF aptamer constructs on (FIG. 21A) microtiter plates coated with VEGF with the addition of biotinylated PDGF, and (FIG. 21B) microtiter plates coated with PDGF with the addition of biotinylated VEGF, as described in Example 12.

[0125] FIG. 22A shows a plot of a number of polar contacts (defined as the sum of hydrogen bonds and charge-charge interactions) versus interface area for traditional aptamers (diamonds) and SOMAmers (circles) (the linear regression fit has an R²=0.91 with a slope of 0.016; dashed lines represent the 99% confidence intervals of this trend, with the SOMAmers falling outside those boundaries). FIG. 22B shows a plot of free energy binding versus polar contacts for traditional aptamers (diamonds) and SOMAmers (circles) (the linear regression fit has an R²=0.64 with a slope of 0.073), and FIG. 22C shows a table showing various thermodynamic properties and contact characteristics of six previous aptamer-protein crystal structures and three SOMAmer-protein crystal structures, including PDGF-BB: 4149-8_260, as described in Example 2. Interaction features for aptamers and SOMAmers bound to protein targets (FIG. 22C references: (a) Convery et al. (1998) Nat. Struct. Biol. 5(2):133; (b) Nomura et al. (2010) Nucleic Acids Res. 38(21): 7822; (c) Pagano et al. (2008) Biophys. J. 94(2):562; (d) Huang et al. (2003) Proc. Natl. Acad. Sci. USA 100(16):9268; (e) Huang et al. (2009) Structure 17(11):1476; (f) Bullock et al. (2000) Nat. Struct. Biol. 7(6):497. Free energy calculations were determined from the measured binding affinities for SOMAmers, or the published K_{d} values using the following temperatures: MS2, thrombin, NFkB, vWF, and GlnRs, room temperature (296 K); IgG, 298 K; SOMAmers, 310 K. SOMAmers show a trend toward higher binding affinities; average free energy of binding, or −ΔG value, is 11.4±1.3 kcal/mol for the six aptamers and 14.3 kcal/mol±0.8 kcal/mol for the three SOMAmers. Protein contact atoms within 4 Å of each ligand were determined in PyMOL. Interface area calculations were made with PISA (aptamers) (Krissinel et al. (2007) J. Mol. Biol. 372(3):774) or PyMOL (SOMAmers) (DeLano (2002) The Pymol Molecular Graphics System, Delano Scientific, San Carlos, Calif.). Within this relatively small data set of crystallographically evaluated interactions, aptamers engage their targets with an average ligand efficiency of 0.21±0.14 kcal/mol per nonhydrogen contact atom, compared to 0.16±0.04 kcal/mol per non-hydrogen contact atom for SOMAmers. Free energies of binding per interface area are also similar, with an average value of 0.017±0.009 kcal·mol⁻¹·Å⁻² for aptamers and 0.012±0.001 kcal·mol⁻¹·Å⁻² for SOMAmers. The value of free energy of binding per polar contact, calculated from values in the table, is about twice as large for SOMAmers (average of 1.75±0.36 kcal/mol per polar contact) as for aptamers (0.89±0.56 kcal/mol per polar contact).

[0126] FIGS. 23A and B show plots of the percent of full-length aptamer 4867-31_192 (250 nM starting concentration) remaining versus time when digested at 37° C. for the indicated number of hours with 0.002 units/μL DNase I (FIG. 23A) or 0.24 units/μL DNase II (FIG. 23B) as described in Example 14. Digestion products were separated from full-length aptamer by polyacrylamide gel electrophoresis and bands visualized with SYBR Gold. Percent full-length aptamer band determined by desitometry.

[0127] FIG. 24 shows plots of the percent full-length aptamer remaining (250 nM starting concentration) versus time when incubated at 37° C. for the indicated number of hours with 0.24 units/μL DNase II as described in Example 14. Digestion products were separated from full-length aptamer by polyacrylamide gel electrophoresis and bands visualized with SYBR Gold. Percent full-length aptamer remaining, as indicated by aptamer identification no. was determined by desitometry. The plot for aptamer ID no. 4867-31_192 is the same plot as shown in FIG. 23B.

[0128] FIG. 25 shows plots of the percent full-length aptamer remaining (500 nM starting concentration) versus time when incubated at 37° C. for the indicated number of hours in 90% vitreous humor obtained from New Zealand White rabbits as described in Example 14. (Aptamers were resolved by polyacrylamide gel electrophoresis and stained with SYBR Gold. Percent full-length aptamer remaining, as indicated by aptamer identification no. was determined by desitometry.

[0129] FIGS. 26A and B show plots of the percent of full-length aptamer 5169-4_146 (250 nM starting concentration) remaining versus time when digested at 37° C. for the indicated number of hours with 0.01 units/μL DNase I (FIG. 25A) or 0.12 units/μL DNase II (FIG. 26B) as described in Example 14. Digestion products were separated from full-length aptamer by polyacrylamide gel electrophoresis and bands visualized with SYBR Gold. Percent full-length aptamer was determined by desitometry.

[0130] FIG. 27 shows a plot of the percent full-length aptamer 5169-4_182 remaining (250 nM starting concentration) versus time when incubated at 37° C. for the indicated number of hours with 0.01 units/p L DNase I as described in Example 14. Digestion products were separated from full-length aptamer by polyacrylamide gel electrophoresis and bands visualized with SYBR Gold. Percent full-length aptamer determined by desitometry.

[0131] FIG. 28 shows plots of the percent of full-length aptamer remaining (500 nM starting concentration) versus time when incubated at 37° C. for the indicated number of hours in 90% vitreous humor obtained from New Zealand White rabbits as described in Example 14. Digestion products were separated from full-length aptamer by polyacrylamide gel electrophoresis and bands visualized with SYBR Gold. Percent full-length aptamer, as indicated by aptamer identification no. was determined by desitometry.

[0132] FIG. 29 shows plots of the percent full-length aptamer remaining (250 nM starting concentration) versus time when incubated at 37° C. for the indicated number of hours with 0.01 units/μL DNase I as described in Example 14. Digestion products were separated from full-length aptamer by polyacrylamide gel electrophoresis and bands visualized with SYBR Gold. Percent full-length aptamer remaining, as indicated by aptamer identification no. was determined by desitometry.

[0133] FIG. 30 shows a plot of the percent full-length aptamer 4149-8_379 remaining (250 nM starting concentration) versus time when incubated at 37° C. for the indicated number of hours with 0.12 units/μL DNase II as described in Example 14. Digestion products were separated from full-length aptamer by polyacrylamide gel electrophoresis and bands visualized with SYBR Gold. Percent full-length aptamer determined by desitometry.

[0134] FIG. 31 shows plots of the percent of full-length aptamer remaining (250 nM starting concentration) versus time when incubated at 37° C. for the indicated number of hours with 0.12 units/μL DNase II as described in Example 14. Digestion products were separated from full-length aptamer by polyacrylamide gel electrophoresis and bands visualized with SYBR Gold. Percent full-length aptamer, as indicated by aptamer identification no. was determined by desitometry. The plot for aptamer ID no. 4149-8_379 is the same plot as shown in FIG. 30.

### DETAILED DESCRIPTION

[0135] Reference will now be made in detail to representative embodiments of the invention. While the invention will be described in conjunction with the enumerated embodiments, it will be understood that the invention is not intended to be limited to those embodiments. On the contrary, the invention is intended to cover all alternatives, modifications, and equivalents that may be included within the scope of the present invention as defined by the claims.

[0136] One skilled in the art will recognize many methods and materials similar or equivalent to those described herein, which could be used in and are within the scope of the practice of the present invention. The present invention is in no way limited to the methods and materials described.

[0137] Unless defined otherwise, technical and scientific terms used herein have the same meaning as commonly understood by one of ordinary skill in the art(s) to which this invention belongs. Although any methods, devices, and materials similar or equivalent to those described herein can be used in the practice or testing of the invention, the preferred methods, devices and materials are now described.

[0138] All publications, published patent documents, and patent applications cited in this disclosure are indicative of the level of skill in the art(s) to which the disclosure pertains. All publications, published patent documents, and patent applications cited herein are hereby incorporated by reference to the same extent as though each individual publication, published patent document, or patent application was specifically and individually indicated as being incorporated by reference.

[0139] As used in this disclosure, including the appended claims, the singular forms “a,” “an,” and “the” include plural references, unless the content clearly dictates otherwise, and are used interchangeably with “at least one” and “one or more.” Thus, reference to “an aptamer” includes mixtures of aptamers, and the like.

[0140] As used herein, the term “about” represents an insignificant modification or variation of the numerical value such that the basic function of the item to which the numerical value relates is unchanged.

[0141] As used herein, the terms “comprises,” “comprising,” “includes,” “including,” “contains,” “containing,” and any variations thereof, are intended to cover a non-exclusive inclusion, such that a process, method, product-by-process, or composition of matter that comprises, includes, or contains an element or list of elements does not include only those elements but may include other elements not expressly listed or inherent to such process, method, product-by-process, or composition of matter.

[0142] As used herein, the term “nucleotide” refers to a ribonucleotide or a deoxyribonucleotide, or a modified form thereof, as well as an analog thereof. Nucleotides include species that include purines (e.g., adenine, hypoxanthine, guanine, and their derivatives and analogs) as well as pyrimidines (e.g., cytosine, uracil, thymine, and their derivatives and analogs).

[0143] As used herein, “nucleic acid,” “oligonucleotide,” and “polynucleotide” are used interchangeably to refer to a polymer of nucleotides and include DNA, RNA, DNA/RNA hybrids and modifications of these kinds of nucleic acids, oligonucleotides and polynucleotides, wherein the attachment of various entities or moieties to the nucleotide units at any position are included. The terms “polynucleotide,” “oligonucleotide,” and “nucleic acid” include double- or single-stranded molecules as well as triple-helical molecules. Nucleic acid, oligonucleotide, and polynucleotide are broader terms than the term aptamer and, thus, the terms nucleic acid, oligonucleotide, and polynucleotide include polymers of nucleotides that are aptamers but the terms nucleic acid, oligonucleotide, and polynucleotide are not limited to aptamers.

[0144] As used herein, the terms “modify”, “modified”, “modification”, and any variations thereof, when used in reference to an oligonucleotide, means that at least one of the four constituent nucleotide bases (i.e., A, G, T/U, and C) of the oligonucleotide is an analog or ester of a naturally occurring nucleotide. In some embodiments, the modified nucleotide confers nuclease resistance to the oligonucleotide. In some embodiments, the modified nucleotides lead to predominantly hydrophobic interactions of aptamers with protein targets resulting in high binding efficiency and stable co-crystal complexes. A pyrimidine with a substitution at the C-5 position is an example of a modified nucleotide. Modifications can include backbone modifications, methylations, unusual base-pairing combinations such as the isobases isocytidine and isoguanidine, and the like. Modifications can also include 3′ and 5′ modifications, such as capping. Other modifications can include substitution of one or more of the naturally occurring nucleotides with an analog, internucleotide modifications such as, for example, those with uncharged linkages (e.g., methyl phosphonates, phosphotriesters, phosphoamidates, carbamates, etc.) and those with charged linkages (e.g., phosphorothioates, phosphorodithioates, etc.), those with intercalators (e.g., acridine, psoralen, etc.), those containing chelators (e.g., metals, radioactive metals, boron, oxidative metals, etc.), those containing alkylators, and those with modified linkages (e.g., alpha anomeric nucleic acids, etc.). Further, any of the hydroxyl groups ordinarily present on the sugar of a nucleotide may be replaced by a phosphonate group or a phosphate group; protected by standard protecting groups; or activated to prepare additional linkages to additional nucleotides or to a solid support. The 5′ and 3′ terminal OH groups can be phosphorylated or substituted with amines, organic capping group moieties of from about 1 to about 20 carbon atoms, polyethylene glycol (PEG) polymers in some embodiments ranging from about 10 to about 80 kDa, PEG polymers in some embodiments ranging from about 20 to about 60 kDa, or other hydrophilic or hydrophobic biological or synthetic polymers. In some embodiments, modifications are of the C-5 position of pyrimidines. These modifications can be produced through an amide linkage directly at the C-5 position or by other types of linkages.

[0145] Polynucleotides can also contain analogous forms of ribose or deoxyribose sugars that are generally known in the art, including 2′-O-methyl-, 2′-O-allyl, 2′-fluoro- or 2′-azido-ribose, carbocyclic sugar analogs, α-anomeric sugars, epimeric sugars such as arabinose, xyloses or lyxoses, pyranose sugars, furanose sugars, sedoheptuloses, acyclic analogs and abasic nucleoside analogs such as methyl riboside. As noted above, one or more phosphodiester linkages may be replaced by alternative linking groups. These alternative linking groups include embodiments wherein phosphate is replaced by P(O)S (“thioate”), P(S)S (“dithioate”), (O)NR₂ (“amidate”), P(O)R, P(O)OR′, CO or CH₂ (“formacetal”), in which each R or R′ is independently H or substituted or unsubstituted alkyl (1-20 C) optionally containing an ether (—O—) linkage, aryl, alkenyl, cycloalkyl, cycloalkenyl or aralkyl. Not all linkages in a polynucleotide need be identical. Substitution of analogous forms of sugars, purines, and pyrimidines can be advantageous in designing a final product, as can alternative backbone structures like a polyamide backbone, for example.

[0146] As used herein, the term “nuclease” refers to an enzyme capable of cleaving the phosphodiester bond between nucleotide subunits of an oligonucleotide. As used herein, the term “endonuclease” refers to an enzyme that cleaves phosphodiester bond(s) at a site internal to the oligonucleotide. As used herein, the term “exonuclease” refers to an enzyme which cleaves phosphodiester bond(s) linking the end nucleotides of an oligonucleotide. Biological fluids typically contain a mixture of both endonucleases and exonucleases.

[0147] As used herein, the terms “nuclease resistant” and “nuclease resistance” refers to the reduced ability of an oligonucleotide to serve as a substrate for an endo- or exonuclease, such that, when contacted with such an enzyme, the oligonucleotide is either not degraded or is degraded more slowly than an oligonucleotide composed of unmodified nucleotides.

[0148] As used herein, the term “C-5 modified pyrimidine” refers to a pyrimidine with a modification at the C-5 position including, but not limited to, those moieties illustrated in FIG. 12. Examples of a C-5 modified pyrimidine include those described in U.S. Pat. Nos. 5,719,273 and 5,945,527. Examples of a C-5 modification include substitution of deoxyuridine at the C-5 position with a substituent independently selected from: benzylcarboxyamide (alternatively benzylaminocarbonyl) (Bn), naphthylmethylcarboxyamide (alternatively naphthylmethylaminocarbonyl) (Nap), tryptaminocarboxyamide (alternatively tryptaminocarbonyl) (Trp), phenethylcarboxyamide (alternatively phenethylamino carbonyl) (Pe), thiophenylmethylcarboxyamide (alternatively thiophenylmethylaminocarbonyl) (Th) and isobutylcarboxyamide (alternatively isobutylaminocarbonyl) (iBu) as illustrated immediately below.

[chemical structure]

[0149] Chemical modifications of a C-5 modified pyrimidine can also be combined with, singly or in any combination, 2′-position sugar modifications, modifications at exocyclic amines, and substitution of 4-thiouridine and the like.

[0150] Representative C-5 modified pyrimidines include: 5-(N-benzylcarboxyamide)-2′-deoxyuridine (BndU), 5-(N-benzylcarboxyamide)-2′-O-methyluridine, 5-(N-benzylcarboxyamide)-2′-fluorouridine, 5-(N-isobutylcarboxyamide)-2′-deoxyuridine (iBudU), 5-(N-isobutylcarboxyamide)-2′-O-methyluridine, 5-(N-phenethylcarboxyamide)-2′-deoxyuridine (PedU), 5-(N-thiophenylmethylcarboxyamide)-2′-deoxyuridine (ThdU), 5-(N-isobutylcarboxyamide)-2′-fluorouridine, 5-(N-tryptaminocarboxyamide)-2′-deoxyuridine (TrpdU), 5-(N-tryptaminocarboxyamide)-2′-O-methyluridine, 5-(N-tryptaminocarboxyamide)-2′-fluorouridine, 5-(N-[1-(3-trimethylamonium) propyl]carboxyamide)-2′-deoxyuridine chloride, 5-(N-naphthylmethylcarboxyamide)-2′-deoxyuridine (NapdU), 5-(N-naphthylmethylcarboxyamide)-2′-O-methyluridine, 5-(N-naphthylmethylcarboxyamide)-2′-fluorouridine or 5-(N-[1-(2,3-dihydroxypropyl)]carboxyamide)-2′-deoxyuridine).

[0151] Nucleotides can be modified either before or after synthesis of an oligonucleotide. A sequence of nucleotides in an oligonucleotide may be interrupted by one or more non-nucleotide components. A modified oligonucleotide may be further modified after polymerization, such as, for example, by conjugation with any suitable labeling component.

[0152] As used herein, the term “at least one pyrimidine,” when referring to modifications of a nucleic acid, refers to one, several, or all pyrimidines in the nucleic acid, indicating that any or all occurrences of any or all of C, T, or U in a nucleic acid may be modified or not.

[0153] As used herein, A, C, G, U and T denote dA, dC, dG, dU and dT respectively, unless otherwise specified.

[0154] As used herein, “nucleic acid ligand,” “aptamer,” and “clone” are used interchangeably to refer to a non-naturally occurring nucleic acid that has a desirable action on a target molecule. A desirable action includes, but is not limited to, binding of the target, catalytically changing the target, reacting with the target in a way that modifies or alters the target or the functional activity of the target, covalently attaching to the target (as in a suicide inhibitor), and facilitating the reaction between the target and another molecule. In some embodiments, the action is specific binding affinity for a target molecule, such target molecule being a three dimensional chemical structure other than a polynucleotide that binds to the nucleic acid ligand through a mechanism which is independent of Watson/Crick base pairing or triple helix formation, wherein the aptamer is not a nucleic acid having the known physiological function of being bound by the target molecule. Aptamers to a given target include nucleic acids that are identified from a candidate mixture of nucleic acids, where the aptamer is a ligand of the target, by a method comprising: (a) contacting the candidate mixture with the target, wherein nucleic acids having an increased affinity to the target relative to other nucleic acids in the candidate mixture can be partitioned from the remainder of the candidate mixture; (b) partitioning the increased affinity nucleic acids from the remainder of the candidate mixture; and (c) amplifying the increased affinity nucleic acids to yield a ligand-enriched mixture of nucleic acids, whereby aptamers of the target molecule are identified. It is recognized that affinity interactions are a matter of degree; however, in this context, the “specific binding affinity” of an aptamer for its target means that the aptamer binds to its target generally with a much higher degree of affinity than it binds to other, non-target, components in a mixture or sample. An “aptamer” or “nucleic acid ligand” is a set of copies of one type or species of nucleic acid molecule that has a particular nucleotide sequence. An aptamer can include any suitable number of nucleotides. “Aptamers” refer to more than one such set of molecules. Different aptamers can have either the same or different numbers of nucleotides. Aptamers may be DNA or RNA and may be single stranded, double stranded, or contain double stranded or triple stranded regions.

[0155] As used herein, a “SOMAmer” or Slow Off-Rate Modified Aptamer refers to an aptamer (including an aptamers comprising at least one nucleotide with a hydrophobic modification) with an off-rate (t_{1/2}) of ≧30 minutes, ≧60 minutes, ≧90 minutes, ≧120 minutes, ≧150 minutes, ≧180 minutes, ≧210 minutes, or ≧240 minutes. In some embodiments, SOMAmers are generated using the improved SELEX methods described in U.S. Pat. No. 7,947,447, entitled “Method for Generating Aptamers with Improved Off-Rates”.

[0156] As used herein, “protein” is used synonymously with “peptide,” “polypeptide,” or “peptide fragment.” A “purified” polypeptide, protein, peptide, or peptide fragment is substantially free of cellular material or other contaminating proteins from the cell, tissue, or cell-free source from which the amino acid sequence is obtained, or substantially free from chemical precursors or other chemicals when chemically synthesized.

[0157] As used herein, “co-crystal structure” or “co-crystal complex” is a crystal structure comprising two or more interacting molecules.

[0158] As used herein, “cardiovascular condition or disease” means a condition or disease related to heart and its vascular system. Some examples of such conditions or diseases are aneurysm, angina, arrhythmia, atherosclerosis, atrial fibrillation, congestive heart failure, cardiomyopathy, coronary heart disease, restenosis, ischemia, left ventricular hypertrophy, peripheral vascular disease, myocardial infarction, hypertension, valvular heart disease and restrictive heart disease.

[0159] As used herein, “fibrosis” means a disease or condition caused by the formation of an excessive and abnormal amount of fibrous connective tissue in an organ resulting in thickening and scarring of connective tissue, leading to malfunction of the organ. Examples of such diseases and conditions are pulmonary fibrosis, renal fibrosis, liver fibrosis and cystic fibrosis.

[0160] As used herein, “AMD” or “age related macular degeneration” or “macular degeneration” means a condition of the eye that is caused by damage to the retina and results in a loss of vision in the center of the visual field, called the macula. AMD occurs in “wet” and “dry” forms. In “wet” AMD, blood vessels grow from the choroid behind the retina. In “dry” AMD, cellular debris (drusen) accumulates between the retina and choroid. In either form, the retina can become detached.

[0161] As used herein, “ophthalmic disease” or “ophthalmic condition” or “ocular disease” or “ocular condition” refers to any disease or condition that affects or involves occular neovascularization disorders, such as macular degeneration (“wet” and “dry”), retinopathy of prematurity, diabetic retinopathy, neovascular glaucoma, corneal neovascularization, proliferative diabetic retinopathy (the most severe stage of diabetic retinopathy), uveitis (an inflammatory condition of the eye that often leads to macular edema), cystoid macular edema following cataract surgery, myopic degeneration (a condition in which a patient with a high degree of nearsightedness develops choroidal neovascularization), inflammatory macular degeneration (a condition in which a patient with inflammation in the macular area due to infections or other causes, develops choroidal neovascularization), and iris neovascularization (a serious complication of diabetic retinopathy or retinal vein occlusion involving new blood vessel growth on the surface of the iris).

[0162] As used herein, “renal disease” or “renal condition” refers to any disease or condition that affects or involves proliferative kidney disorders such as glomerulonephritis, masangial proliferative renal diseases, polycystic kidney disease, kidney cancers, acute kidney failure, nephropathy, amyloidosis, edema, fibrosis, glomerular diseases, renal infarction and nephritis.

[0163] As used herein “cancer” means a disease or condition involving unregulated and abnormal cell growth. Some examples of common cancers are bladder cancer, lung cancer, breast cancer, melanoma, colon and rectal cancer, lymphoma, endometrial cancer, pancreatic cancer, liver cancer, renal cancer, prostate cancer, leukemia and thyroid cancer.

[0164] As used herein, “modulate” means to alter, either by increasing or decreasing, the level of a peptide or polypeptide, or to alter, either by increasing or decreasing, the stability or activity of a peptide or a polypeptide. The term “inhibit” means to decrease the level of a peptide or a polypeptide or to decrease the stability or activity of a peptide or a polypeptide.

[0165] In one embodiment, the protein which is modulated or inhibited is PDGF.

[0166] As used herein, the term “bioactivity” indicates an effect on one or more cellular or extracellular process (e.g., via binding, signaling, etc.) which can impact physiological or pathophysiological processes.

[0167] As used herein, the terms “platelet-derived growth factor” and “PDGF” refer to PDGF A, B, C, and D isoforms and their homo or heterodimers AA, BB, AB, CC and DD. In some instances, context will determine which isoform and/or heterodimer of PDGF is meant. For example, in some embodiments, the PDGF aptamers described herein bind to the PDGF-B isoform and homo- and heterodimers comprising that isoform, although the aptamers may be described as binding to PDGF. Specifically included in the definition are naturally-occurring human PDGF AA, AB, and BB isoforms and variants. As used herein, PDGF includes all mammalian species of PDGF, including human, canine, feline, murine, primate, equine, and bovine. A nonlimiting exemplary human PDGF-B isoform precursor has the sequence shown in Swiss-Prot Accession No. P01127.1. Nonlimiting exemplary human PDGF-B isoform mature proteins may have the sequence of amino acids 82 to 241 or 82 to 190 of Swiss-Prot Accession No. P01127.1 (referred to herein as amino acids 1 to 160 or 1 to 109 of PDGF-B).

[0168] As used herein, “PDGF receptor” refers to a receptor that is bound by and activated by PDGF, such as PDGF receptor α and PDGF receptor β. PDGF receptors include the receptors of any mammalian species, including, but not limited to, human, canine, feline, murine, equine, primate, and bovine. A nonlimiting exemplary human PDGFRβ precursor has the sequence shown in Swiss-Prot Accession No. P09619.1. A nonlimiting exemplary human PDGFRβ mature protein has the sequence of amino acids 33 to 1106 of Swiss-Prot Accession No. P09619.1. A nonlimiting exemplary human PDGFRα precursor has the sequence shown in Swiss-Prot Accession No. P16234.1. A nonlimiting exemplary human PDGFRα mature protein has the sequence of amino acids 24 to 1089 of Swiss-Prot Accession No. P16234.1.

[0169] A “PDGF aptamer” is an aptamer that is capable of binding to and modifying the activity of PDGF. In some embodiments, a PDGF aptamer inhibits the activity of PDGF in vitro. In some embodiments, a PDGF aptamer inhibits the activity of PDGF in vivo. A nonlimiting exemplary activity of PDGF is PDGF-mediated phosphorylation of the PDGF receptor, such as PDGF receptor α (PDGF Rα) or PDGF receptor β (PDGF Rβ).

[0170] In some embodiments, the “VEGF aptamer” as defined herein is a monomer, dimer or a multimer construct, optionally connected by a linker.

[0171] As used herein, the terms “vascular endothelial growth factor”, and “VEGF” refer to naturally-occurring VEGF, including isoforms and variants, such as VEGF-121, VEGF-145, VEGF-165, VEGF-183, VEGF-189, and VEGF-206. As used herein, VEGF includes all mammalian species of VEGF, including human, canine, feline, murine, primate, equine, and bovine. A nonlimiting exemplary human VEGF precursor has the sequence shown in Swiss-Prot Accession No. P15692.2. VEGF-121 is described, e.g., in Tee et al. (2001) Biochem. J. 359:219; Bornes et al. (2004) J. Biol. Chem. 279:18717.

[0172] As used herein, “VEGF receptor” refers to a receptor that is bound by and activated by VEGF, such as VEGFR-1 and VEGFR-2. VEGF receptors include the receptors of any mammalian species, including, but not limited to, human, canine, feline, murine, equine, primate, and bovine. A nonlimiting exemplary human VEGFR-1 precursor has the sequence shown in Swiss-Prot Accession No. P17948.2. A nonlimiting exemplary human VEGFR-1 mature protein has the sequence of amino acids 27 to 1338 of Swiss-Prot Accession No. P17948.2. A nonlimiting exemplary human VEGFR-2 precursor has the sequence shown in Swiss-Prot Accession No. P35968.2. A nonlimiting exemplary human VEGFR-2 mature protein has the sequence of amino acids 20 to 1356 of Swiss-Prot Accession No. P35968.2.

[0173] A “VEGF aptamer” is an aptamer that is capable of binding to and modifying the activity of VEGF. In some embodiments, a VEGF aptamer inhibits the activity of VEGF in vitro. In some embodiments, a VEGF aptamer inhibits the activity of VEGF in vivo. Nonlimiting exemplary activities of VEGF include VEGF-mediated phosphorylation of the VEGF receptor, such as VEGFR-1 or VEGFR-2. In some embodiments, a VEGF aptamer is provided that competes for binding to VEGF-121 with aptamer 4867-31_183.

[0174] In some embodiments, the “VEGF aptamer” as defined herein is a monomer, dimer or a multimer construct, optionally connected by a linker.

[0175] The terms “PDGFNEGF aptamer construct” and “VEGF/PDGF aptamer construct” are used interchangeably to refer to a construct comprising a PDGF aptamer and a VEGF aptamer. The order of the words “PDGF” and “VEGF” in “PDGFNEGF aptamer construct” and “VEGF/PDGF aptamer construct” is not indicative of how the aptamers are linked, e.g., the order does not indicate which aptamer is located at the 5′-most position of an aptamer construct and which aptamer is located at the 3′-most position in the aptamer construct. In some embodiments, a PDGFNEGF aptamer construct is capable of binding PDGF and VEGF simultaneously. In some embodiments, a PDGFNEGF aptamer construct is capable of binding each of PDGF and VEGF separately. In a PDGFNEGF aptamer construct, the PDGF aptamer and the VEGF aptamer may be linked covalently or non-covalently, e.g., through a binding pair such as streptavidin and biotin. A PDGFNEGF aptamer construct may comprise a linker between the PDGF aptamer and the VEGF aptamer.

[0176] As used herein, “disease or condition mediated by PDGF” refers to diseases or conditions in which PDGF activity may directly or indirectly lead to the disease or condition. Nonlimiting exemplary diseases or conditions mediated by PDGF include cardiovascular diseases such as atherosclerosis, restenosis, cardiac hypertrophy related conditions, and vascular disorders; ophthalmic diseases such as macular degeneration; fibrosis; and cancers.

[0177] As used herein, “disease or condition mediated by VEGF” refers to diseases or conditions in which VEGF activity may directly or indirectly lead to the disease or condition. Nonlimiting exemplary diseases or conditions mediated by VEGF include cardiovascular diseases, autoimmune diseases, inflammatory rheumatic diseases, ophthalmic diseases, and cancers at various stages in the disease process. Nonlimiting examples of cardiovascular diseases are atherosclerosis, restenosis, cardiac hypertrophy related conditions, and vascular disorders. Non-limiting examples of ophthalmic diseases are retinitis, macular degeneration, choroiditis, retinopathy, edema, glaucoma, and cataract.

[0178] As used herein, the term “pharmaceutically acceptable” means approved by a regulatory agency of a federal or a state government or listed in the U.S. Pharmacopoeia or other generally recognized pharmacopoeia for use in animals and, more particularly, in humans. The term “carrier” refers to a diluent, adjuvant, excipient, or vehicle with which the therapeutic is administered and includes, but is not limited to, such sterile liquids as water and oils.

[0179] As used herein, the term “pharmaceutically acceptable salt” or “salt” of a PDGF aptamer, VEGF aptamer or a PDGFNEGF aptamer construct is a product of the disclosed compound that contains an ionic bond and is typically produced by reacting the disclosed compound with either an acid or a base, suitable for administering to an individual. A pharmaceutically acceptable salt can include, but is not limited to, acid addition salts including hydrochlorides, hydrobromides, phosphates, sulphates, hydrogen sulphates, alkylsulphonates, arylsulphonates, arylalkylsulfonates, acetates, benzoates, citrates, maleates, fumarates, succinates, lactates, and tartrates; alkali metal cations such as Li, Na, K, alkali earth metal salts such as Mg or Ca, or organic amine salts.

[0180] As used herein, the term “pharmaceutical composition” is a formulation comprising a PDGF aptamer, a VEGF aptamer, or a PDGFNEGF aptamer construct in a form suitable for administration to an individual. A pharmaceutical composition is typically formulated to be compatible with its intended route of administration. Examples of routes of administration include, but are not limited to, oral and parenteral, e.g., intravenous, intradermal, subcutaneous, inhalation, topical, transdermal, transmucosal, and rectal administration.

[0181] As used herein, the term “therapeutically effective amount” generally means the amount necessary to ameliorate at least one symptom of a disorder or condition to be prevented, reduced, or treated as described herein. The phrase “therapeutically effective amount” as it relates to the PDGF aptamers, VEGF aptamers, or PDGFNEGF aptamer constructs of the present disclosure means the aptamer dosage that provides the specific pharmacological response for which the aptamer is administered in a significant number of individuals in need of such treatment. It is emphasized that a therapeutically effective amount of an aptamer that is administered to a particular individual in a particular instance will not always be effective in treating the conditions/diseases described herein, even though such dosage is deemed to be a therapeutically effective amount by those of skill in the art.

[0182] The terms “SELEX” and “SELEX process” are used interchangeably herein to refer generally to a combination of (1) the selection of nucleic acids that interact with a target molecule in a desirable manner, for example by binding with high affinity to a protein, with (2) the amplification of those selected nucleic acids. The SELEX process can be used to identify aptamers with high affinity to a specific target molecule.

[0183] SELEX generally includes preparing a candidate mixture of nucleic acids, binding of the candidate mixture to the desired target molecule to form an affinity complex, separating the affinity complexes from the unbound candidate nucleic acids, separating and isolating the nucleic acid from the affinity complex, purifying the nucleic acid, and identifying a specific aptamer sequence. The process may include multiple rounds to further refine the affinity of the selected aptamer. The process can include amplification steps at one or more points in the process. See, e.g., U.S. Pat. No. 5,475,096, entitled “Nucleic Acid Ligands.” The SELEX process can be used to generate an aptamer that covalently binds its target as well as an aptamer that non-covalently binds its target. See, e.g., U.S. Pat. No. 5,705,337 entitled “Systematic Evolution of Nucleic Acid Ligands by Exponential Enrichment: Chemi-SELEX.”

[0184] The SELEX process can be used to identify high-affinity aptamers containing modified nucleotides that confer improved characteristics on the aptamer, such as, for example, improved in vivo stability or improved delivery characteristics. Examples of such modifications include chemical substitutions at the ribose and/or phosphate and/or base positions. SELEX process-identified aptamers containing modified nucleotides are described in U.S. Pat. No. 5,660,985, entitled “High Affinity Nucleic Acid Ligands Containing Modified Nucleotides,” which describes oligonucleotides containing nucleotide derivatives chemically modified at the C5 and/or 2′-positions of pyrimidines. U.S. Pat. No. 5,580,737, see supra, describes highly specific aptamers containing one or more nucleotides modified with 2′-amino (2′-NH₂), 2′-fluoro (2′-F), and/or 2′-O-methyl (2′-OMe). See also, U.S. Patent Publication No. 20090098549, entitled “SELEX and PHOTOSELEX,” which describes nucleic acid libraries having expanded physical and chemical properties and their use in SELEX and photoSELEX.

[0185] SELEX can also be used to identify aptamers that have desirable off-rate characteristics. See U.S. Pat. No. 7,947,447, entitled “Method for Generating Aptamers with Improved Off-Rates,” which describes improved SELEX methods for generating aptamers that can bind to target molecules. Methods for producing aptamers and photoaptamers having slower rates of dissociation from their respective target molecules are described. The methods involve contacting the candidate mixture with the target molecule, allowing the formation of nucleic acid-target complexes to occur, and performing a slow off-rate enrichment process wherein nucleic acid-target complexes with fast dissociation rates dissociate and do not reform, while complexes with slow dissociation rates remain intact. Additionally, the methods include the use of modified nucleotides in the production of candidate nucleic acid mixtures to generate aptamers with improved off-rate performance (see U.S. Patent Publication No. 2009/0098549, entitled “SELEX and PhotoSELEX”). (See also U.S. Pat. No. 7,855,054 and U.S. Patent Publication No. 2007/0166740). Each of these applications is incorporated herein by reference in its entirety.

[0186] In some embodiments, methods of selecting aptamers that bind to a target molecule are provided, comprising: (a) preparing a candidate mixture of nucleic acids, wherein the candidate mixture comprises modified nucleic acids in which at least one pyrimidine in at least one, or in each, nucleic acid of the candidate mixture is chemically modified at the C5-position; (b) contacting the candidate mixture with a target molecule, wherein nucleic acids having an increased affinity to the target molecule relative to other nucleic acids in the candidate mixture bind the target molecule, forming nucleic acid-target molecule complexes; (c) partitioning the increased affinity nucleic acids from the remainder of the candidate mixture; and (d) amplifying the increased affinity nucleic acids to yield a mixture of nucleic acids enriched in nucleic acid sequences that are capable of binding to the target molecule with increased affinity, whereby an aptamer to the target molecule is identified. In certain embodiments, the method further includes performing a slow off-rate enrichment process.

[0187] “Target” or “target molecule” or “target” refers herein to any compound upon which a nucleic acid can act in a desirable manner. A target molecule can be a protein, peptide, nucleic acid, carbohydrate, lipid, polysaccharide, glycoprotein, hormone, receptor, antigen, antibody, virus, pathogen, toxic substance, substrate, metabolite, transition state analog, cofactor, inhibitor, drug, dye, nutrient, growth factor, cell, tissue, any portion or fragment of any of the foregoing, etc., without limitation. Virtually any chemical or biological effector may be a suitable target. Molecules of any size can serve as targets. A target can also be modified in certain ways to enhance the likelihood or strength of an interaction between the target and the nucleic acid. A target can also include any minor variation of a particular compound or molecule, such as, in the case of a protein, for example, minor variations in amino acid sequence, disulfide bond formation, glycosylation, lipidation, acetylation, phosphorylation, or any other manipulation or modification, such as conjugation with a labeling component, which does not substantially alter the identity of the molecule. A “target molecule” or “target” is a set of copies of one type or species of molecule or multimolecular structure that is capable of binding to an aptamer. “Target molecules” or “targets” refer to more than one such set of molecules. Embodiments of the SELEX process in which the target is a peptide are described in U.S. Pat. No. 6,376,190, entitled “Modified SELEX Processes Without Purified Protein.”

### Exemplary PDGF Aptamers

[0188] The PDGF aptamers of the instant disclosure were identified using the improved SELEX method for identifying aptamers having slow off-rates as described in Example 1, which describes a representative method for the selection and production of an aptamer that binds PDGF with a slow dissociation rate. A random DNA library composed of benzyl-dU (Bn-dU), dA, dC and dG was used for the selection. Using this method, the DNA aptamer to PDGF-BB designated as aptamer 4149-8_1 (SEQ ID NO: 1) was identified.

[0189] Using aptamer 4149-8_1 (SEQ ID NO: 1), studies were conducted to identify the minimum sequence length required to maintain strong affinity for PDGF. Systematic truncation from the 5′ and 3′ ends led to identification of a core motif consisting of 29 nucleotides (4149-8_38; SEQ ID NO. 38). Aptamer 4149-8_38 exhibited high affinity binding to PDGF-BB (K_{d} value of 20 pM; FIG. 6).

[0190] Additional sequencing studies were conducted on the sequence pool from which aptamer 4149-8_1 (SEQ ID NO: 1) was selected. 454 sequencing, which is a large-scale, high throughput method that uses parallel pyrosequencing, provides unbiased sample preparation and very accurate sequence analysis. The sequencing data was used to identify a consensus sequence for a PDGF aptamer as shown in FIG. 3. Furthermore, nucleotide substitution studies illustrated in FIG. 6 led to the discovery that six of eight BndU positions in the consensus sequence were desirable for PDGF binding, but four BndU positions could be replaced with dT with little or no loss of binding activity. A consensus sequence is shown in FIG. 3A, along with a graphic representation of the nucleotide frequency at each position relative to the aptamer 4149-8_1 (SEQ ID NO: 1).

[0191] In some embodiments, a PDGF aptamer comprises the sequence:

5′-NZVSLₙS′V′ZACNNₘGCGZZAZAGCG-3′ (SEQ ID NO: 500),
wherein
V is selected from an A, C or G;
V′ is selected from a C, G or Z, wherein V′ is complementary to V;
S and S′ are independently selected from a C or G, wherein S and S′ are complementary to each other;
each N is independently selected from any naturally occurring or modified nucleotide;
each Z is independently selected from a modified pyrimidine;
L is selected from any naturally occurring or modified nucleotide, a hydrocarbon linker, a polyethylene glycol linker or a combination thereof;
n is 0 to 20; and m is 0 to 20; and wherein one or more nucleotide insertions are optionally included.

[0192] In some embodiments, a PDGF aptamer comprises the sequence:

5′-ZZVSLₙS′V′ZACNNₘGCGZZZAZAGCG-3′ (SEQ ID NO: 501), wherein V, V′, N, S, S′, Z, L, n, and m are as defined above.

[0193] In some embodiments, a PDGF aptamer comprises the sequence:

### 5′-ZZVCLₙGV′ZACNMGCGZZZAZAGCG-3′ (SEQ ID NO: 502),

[0194] wherein Z, V, V′, N, Z, L, and n are as defined above and M is selected from C and A.

[0195] In some embodiments, a PDGF aptamer comprises the sequence: 5′-ZZACLₙGZZACACGCGZZZAZAGCG-3′ (SEQ ID NO: 503), wherein Z, L, and n are as defined above.

[0196] In some embodiments, a PDGF aptamer comprises the sequence: 5′-ZZACGACZACGZZACACGCGZZZAZAGCG-3′ (SEQ ID NO: 504), wherein Z is as defined above.

[0197] In some embodiments, a PDGF aptamer comprises the sequence: 5′-ZVSLₙS′V′ZACNNₘGCGZZZAZAG-3′ (SEQ ID NO: 507),

wherein
V is selected from an A, C or G;
V′ is selected from a C, G or Z, wherein V′ is complementary to V;
S and S′ are independently selected from a C or G, wherein S and S′ are complementary to other;
each N is independently selected from modified or unmodified nucleotide;
each Z is independently selected from a modified pyrimidine;
L is selected from a substituted or unsubstituted C₂-C₂₀ linker and a modified or unmodified nucleotide;
n is 1 to 50; and m is 0 to 50; and
wherein one or more nucleotide insertions are optionally included.

[0198] In some embodiments, a PDGF aptamer comprises the sequence: 5′-Z′ZVSLₙS′V′ZACNNₘGCGZZZAZAGC-3′ (SEQ ID NO: 508), wherein Z′ is a modified pyrimidine or dT; and V, V′, N, S, S′, Z, L, n, and m are as defined above.

[0199] In some embodiments, a PDGF aptamer comprises the sequence: 5′-Z′ZVCLₙV′ZACNMGCGZZZAZAGC-3′ (SEQ ID NO: 509),

wherein Z, Z′, V, V′, N, Z, L, and n are as defined above and M is selected from C and A.

[0200] In some embodiments, a PDGF aptamer comprises the sequence: 5′-Z′ZACLₙGZZACACGCGZZZAZAGC-3′ (SEQ ID NO: 510), wherein Z, Z′, L, and n are as defined above.

[0201] In some embodiments, a PDGF aptamer comprises the sequence: 5′-Z′ZACGACZACGZZACACGCGZZZAZAGC-3′ (SEQ ID NO: 511), wherein Z and Z′ are as defined above.

[0202] In some embodiments, a PDGF aptamer comprises the sequence: 5′-ZABLₚGYZABK_{q}GCGZZYDYAG-3′ (SEQ ID NO: 505)

wherein each Z is, independently, a modified pyrimidine;
each B is independently selected from C and a substituted or unsubstituted C₂-C₁₀ linker;
each L is independently selected from a substituted or unsubstituted C₂-C₁₀ linker, a hexaethylene glycol linker, and a modified or unmodified nucleotide, wherein p is 1 to 10;
each Y is independently selected from a modified or unmodified pyrimidine;
each K is independently selected from a substituted or unsubstituted C₂-C₁₀ linker, a hexaethylene glycol linker, and a modified or unmodified nucleotide, wherein q is 1 to 5; and
D is selected from A and a substituted or unsubstituted C₂-C₁₀ linker.

[0203] In some embodiments, a PDGF aptamer comprises the sequence: 5′-XZABLₙGYZABLₙGCGZZYDYAGBE-3′ (SEQ ID NO: 506),

wherein X is selected from a modified or unmodified pyrimidine and a substituted or unsubstituted C₂-C₁₀ linker, or is absent; and E is selected from G and a substituted or unsubstituted C₂-C₁₀ linker, or is absent.

[0204] An aptamer construct comprising the sequences NZVS (SEQ ID NO 761) and S′V′ZACNNₘGCGZZZAZAGCG (SEQ ID NO: 762),

wherein
V is selected from an A, C or G; V′ is selected from a C, G or Z, wherein V′ is selected from a C, G or Z, wherein V′ is complementary to V;
S and S′ are independently selected from a C or G, wherein S and S′ are complementary to each other;
N is independently selected from any naturally occurring or modified nucleotide;
Z is independently selected from a modified pyrimidine;
m is 1 to 20; and
wherein one or more nucleotide insertions are optionally included.

[0205] In some embodiments, Z is a modified uridine. In some embodiments, each Z is independently selected from the C-5 modified pyrimidines as defined herein. In some embodiments, each Z is independently selected from
[0206] 5-(N-benzylcarboxyamide)-2′-deoxyuridine (BndU),
[0207] 5-(N-benzylcarboxyamide)-2′-O-methyluridine,
[0208] 5-(N-benzylcarboxyamide)-2′-fluorouridine,
[0209] 5-(N-phenethylcarboxyamide)-2′-deoxyuridine (PEdU),
[0210] 5-(N-thiophenylmethylcarboxyamide)-2′-deoxyuridine (ThdU),
[0211] 5-(N-isobutylcarboxyamide)-2′-deoxyuridine (iBudU),
[0212] 5-(N-tyrosylcarboxyamide)-2′-deoxyuridine (TyrdU),
[0213] 5-(N-3,4-methylenedioxybenzylcarboxyamide)-2′-deoxyuridine (MBndU),
[0214] 5-(N-4-fluorobenzylcarboxyamide)-2′-deoxyuridine (FBndU),
[0215] 5-(N-3-phenylpropylcarboxyamide)-2′-deoxyuridine (PPdU),
[0216] 5-(N-imidizolylethylcarboxyamide)-2′-deoxyuridine (ImdU),
[0217] 5-(N-isobutylcarboxyamide)-2′-O-methyluridine,
[0218] 5-(N-isobutylcarboxyamide)-2′-fluorouridine,
[0219] 5-(N-tryptaminocarboxyamide)-2′-deoxyuridine (TrpdU),
[0220] 5-(N—R-threoninylcarboxyamide)-2′-deoxyuridine (ThrdU),
[0221] 5-(N-tryptaminocarboxyamide)-2′-O-methyluridine,
[0222] 5-(N-tryptaminocarboxyamide)-2′-fluorouridine,
[0223] 5-(N-[1-(3-trimethylamonium) propyl]carboxyamide)-2′-deoxyuridine chloride,
[0224] 5-(N-naphthylmethylcarboxyamide)-2′-deoxyuridine (NapdU),
[0225] 5-(N-naphthylmethylcarboxyamide)-2′-O-methyluridine,
[0226] 5-(N-naphthylmethylcarboxyamide)-2′-fluorouridine,
[0227] 5-(N-[1-(2,3-dihydroxypropyl)]carboxyamide)-2′-deoxyuridine),
[0228] 5-(N-2-naphthylmethylcarboxyamide)-2′-deoxyuridine (2NapdU),
[0229] 5-(N-2-naphthylmethylcarboxyamide)-2′-O-methyluridine,
[0230] 5-(N-2-naphthylmethylcarboxyamide)-2′-fluorouridine,
[0231] 5-(N-1-naphthylethylcarboxyamide)-2′-deoxyuridine (NEdU),
[0232] 5-(N-1-naphthylethylcarboxyamide)-2′-O-methyluridine,
[0233] 5-(N-1-naphthylethylcarboxyamide)-2′-fluorouridine,
[0234] 5-(N-2-naphthylethylcarboxyamide)-2′-deoxyuridine (2NEdU),
[0235] 5-(N-2-naphthylethylcarboxyamide)-2′-O-methyluridine,
[0236] 5-(N-2-naphthylethylcarboxyamide)-2′-fluorouridine,
[0237] 5-(N-3-benzofuranylethylcarboxyamide)-2′-deoxyuridine (BFdU),
[0238] 5-(N-3-benzofuranylethylcarboxyamide)-2′-O-methyluridine,
[0239] 5-(N-3-benzofuranylethylcarboxyamide)-2′-fluorouridine,
[0240] 5-(N-3-benzothiophenylethylcarboxyamide)-2′-deoxyuridine (BTdU),
[0241] 5-(N-3-benzothiophenylethylcarboxyamide)-2′-O-methyluridine, and
[0242] 5-(N-3-benzothiophenylethylcarboxyamide)-2′-fluorouridine.

[0243] In certain embodiments, portions of the PDGF and/or VEGF aptamer (Y) may not be necessary to maintain binding and certain portions of the contiguous PDGF and/or VEGF aptamer can be modified, including, but not limited to, replacement with a spacer or linker moiety. In these embodiments, for example, Y can be represented as Y′-Q-Y″-Q′-Y′″, wherein Y′, Y″ and Y′″ are parts of a PDGF and/or VEGF aptamer or segments of different PDGF and/or VEGF aptamers and Q and/or Q′ are spacers or linker molecules that modify certain nucleic acid features of the original PDGF and/or VEGF aptamer. When Q and Q′ are not present, Y′, Y″, and Y′″ represent one contiguous PDGF and/or VEGF aptamer (Y).

[0244] As used herein a “linker” is a molecular entity that connects two or more molecular entities through covalent bond or non-covalent interactions and can allow spatial separation of the molecular entities in a manner that preserves the functional properties of one or more of the molecular entities. A linker can also be known as a spacer. Appropriate linker sequences will be readily ascertained by those of skill in the art based upon the present disclosure.

[0245] As used herein, a linker can comprise one or more molecules or sub-components, selected from the group including, but not limited to, a polynucleotide, a polypeptide, a peptide nucleic acid, a locked nucleic acid, an oligosaccharide, a polysaccharide, an antibody, an affibody, an antibody mimic, an aliphatic, aromatic or heteroaromatic carbon molecule, a polyethylene glycol (PEG) molecule, a cell receptor, a ligand, a lipid, any fragment or derivative of these structures, any combination of the foregoing, or any other chemical structure or component.

[0246] In some embodiments, at least one L is a polyethylene glycol linker. In some embodiments, at least one L is a hexaethylene glycol linker. In some embodiments, L is a substituted or unsubstituted C₂-C₁₀ linker. In some embodiments, p is 1, 2, 3, 4, 5, 6, 7, or 8. In some embodiments, p is 1, 2, or 3. In some embodiments, at least one K is a polyethylene glycol linker. In some embodiments, at least one K is a hexaethylene glycol linker. In some embodiments, K is a substituted or unsubstituted C₂-C₁₀ linker. In some embodiments, q is 1 or 2. In some embodiments, q is 1.

[0247] In various embodiments, m may be 0 to 20, 0 to 19, 0 to 18, 0 to 17, 0 to 16, 0 to 15, 0 to 15, 0 to 14, 0 to 13, 0 to 12, 0 to 11, 0 to 10, 0 to 9, 0 to 8, 0 to 7, 0 to 6, 0 to 5, 0 to 4, or 0 to 3.

[0248] In some embodiments, L may be a linker such as an 18-atom hexaethylene glycol linker. In some embodiments, the L may be a combination of nucleotides and a linker. As a nonlimiting example, the following aptamers (SEQ ID NOs 67 and 69) include a hexaethylene glycol (Heg) linker:

### (SEQ ID NO. 67) 5′-Bn-Bn-A-C-Heg-G-Bn-Bn-A-C-A-C-G-C-G-Bn-Bn-Bn-A-Bn-A-G-C-G-3′

### (SEQ ID NO. 69) 5′-Bn-Bn-A-C-G-Heg-C-G-Bn-Bn-A-C-A-C-G-C-G-Bn-Bn-Bn-A-Bn-A-G-C-G-3′

[0249] wherein Bn is benzyl-dU and Heg is a hexaethylene glycol linker.

[0250] In some embodiments, an N may be replaced by a linker, such as in the following aptamers:

### (SEQ ID NO. 329) 5′-Bn-Bn-A-C-Heg-G-Bn-Bn-A-C-C3-G-C-G-Bn-Bn-Bn-A-Bn-A-G-C-3′

### (SEQ ID NO. 408) 5′-Bn-Bn-A-C-Heg-G-Bn-Bn-A-C-C3-C-G-Bn-Bn-Bn-A-Bn-A-G-3′

[0251] wherein Bn is benzyl-dU, Heg is a hexaethylene glycol linker and C3 is a three carbon linker.

[0252] Further PDGF aptamers were identified using the improved SELEX method for identifying aptamers having slow off-rates as described in Example 5, which describes a representative method for the selection and production of an aptamer that binds PDGF with a slow dissociation rate. A random DNA library composed of napthyl-dU (Nap-dU), dA, dC and dG was used for the selection. PDGF aptamer 5169-4_26 was identified in the screen.

[0253] In some embodiments, an aptamer that specifically binds PDGF is provided, wherein the aptamer competes for binding to PDGF with PDGF aptamer 5169-4_26. In some such embodiments, the aptamer comprises at least one modified nucleoside comprising a hydrophobic nucleobase modification. Further, in some such embodiments, the hydrophobic nucleobase modification is a modified pyrimidine. In some embodiments, each modified pyrimidine may be independently selected from 5-(N-benzylcarboxyamide)-2′-deoxyuridine (BndU), 5-(N-benzylcarboxyamide)-2′-O-methyluridine, 5-(N-benzylcarboxyamide)-2′-fluorouridine, 5-(N-phenethylcarboxyamide)-2′-deoxyuridine (PedU), 5-(N-thiophenylmethylcarboxyamide)-2′-deoxyuridine (ThdU), 5-(N-isobutylcarboxyamide)-2′-deoxyuridine (iBudU), 5-(N-isobutylcarboxyamide)-2′-O-methyluridine, 5-(N-isobutylcarboxyamide)-2′-fluorouridine, 5-(N-tryptaminocarboxyamide)-2′-deoxyuridine (TrpdU), 5-(N-tryptaminocarboxyamide)-2′-O-methyluridine, 5-(N-tryptaminocarboxyamide)-2′-fluorouridine, 5-(N-[1-(3-trimethylamonium) propyl]carboxyamide)-2′-deoxyuridine chloride, 5-(N-naphthylmethylcarboxyamide)-2′-deoxyuridine (NapdU), 5-(N-naphthylmethylcarboxyamide)-2′-O-methyluridine, 5-(N-naphthylmethylcarboxyamide)-2′-fluorouridine, and 5-(N-[1-(2,3-dihydroxypropyl)]carboxyamide)-2′-deoxyuridine).

[0254] In some embodiments, an aptamer that specifically bind PDGF is provided, wherein the aptamer comprises the sequence: 5′-ACALₙZGZAZGLₘZLZ-3′ (SEQ ID NO. 512);

wherein each Z is, independently, a modified pyrimidine; each L is independently selected from a substituted or unsubstituted C₂-C₅₀ linker, a polyethylene glycol linker, and a modified or unmodified nucleotide; n is 1 to 5; and m is 1 to 10.

[0255] In some embodiments, each is independently selected from 5-(N-benzylcarboxyamide)-2′-deoxyuridine (BndU), 5-(N-benzylcarboxyamide)-2′-O-methyluridine, 5-(N-benzylcarboxyamide)-2′-fluorouridine, 5-(N-phenethylcarboxyamide)-2′-deoxyuridine (PedU), 5-(N-thiophenylmethylcarboxyamide)-2′-deoxyuridine (ThdU), 5-(N-isobutylcarboxyamide)-2′-deoxyuridine (iBudU), 5-(N-isobutylcarboxyamide)-2′-O-methyluridine, 5-(N-isobutylcarboxyamide)-2′-fluorouridine, 5-(N-tryptaminocarboxyamide)-2′-deoxyuridine (TrpdU), 5-(N-tryptaminocarboxyamide)-2′-O-methyluridine, 5-(N-tryptaminocarboxyamide)-2′-fluorouridine, 5-(N-[1-(3-trimethylamonium) propyl]carboxyamide)-2′-deoxyuridine chloride, 5-(N-naphthylmethylcarboxyamide)-2′-deoxyuridine (NapdU), 5-(N-naphthylmethylcarboxyamide)-2′-O-methyluridine, 5-(N-naphthylmethylcarboxyamide)-2′-fluorouridine, and 5-(N-[1-(2,3-dihydroxypropyl)]carboxyamide)-2′-deoxyuridine). In some embodiments, at least one, at least two, at least three, at least four, or each Z is 5-(N-naphthylmethylcarboxyamide)-2′-deoxyuridine (NapdU). In some embodiments, n is 1, 2, 3, 4, or 5. In some embodiments, m is 1, 2, 3, 4, 5, 6, 7, 8, 9, or 10. In some embodiments, n is 3. In some embodiments, m is 4. In some such embodiments, each L is independently selected from a modified nucleotide, an unmodified nucleotide, and a C3 linker.

[0256] A C₂-C₅₀ linker or spacer may be a backbone comprising a chain of 2 to 50 carbon atoms (C₂-C₅₀) (saturated, unsaturated, straight chain, branched or cyclic), 0 to 10 aryl groups, 0 to 10 heteroaryl groups, and 0 to 10 heterocyclic groups, optionally comprising an ether (—O—) linkage, (e.g., one or more alkylene glycol units, including but not limited to one or more ethylene glycol units —O—(CH₂CH₂O)—; one or more 1,3-propane diol units —O—(CH₂CH₂CH₂O)—. etc.); an amine (—NH—) linkage; an amide (—NC(O)—) linkage; and a thioether (—S—) linkage; etc.; wherein each backbone carbon atom may be independently unsubstituted (i.e., comprising —H substituents) or may be substituted with one or more groups selected from a C₁ to C₃ alkyl, —OH, —NH₂, —SH, —O—(C₁ to C₆ alkyl), —S—(C₁ to C₆ alkyl), halogen, —OC(O)(C₁ to C₆ alkyl), —NH—(C₁ to C₆ alkyl), and the like. In some embodiments, a C₂-C₅₀ linker is a C₂-C₂₀ linker, a C₂-C₁₀ linker, a C₂-C₈ linker, a C₂-C₆ linker, a C₂-C₅ linker, a C₂-C₄ linker, or a C₃ linker, wherein each carbon may be independently substituted as described above.

[0257] In some embodiments, one or more nucleosides of a PDGF aptamer comprise a modification selected from a 2′-position sugar modification (such as a 2′-amino (2′-NH₂), a 2′-fluoro (2′-F), or a 2′-O-methyl (2′-OMe)), a modification at a cytosine exocyclic amine, an internucleoside linkage modification, and a 5-methyl-cytosine. In some embodiments, a PDGF aptamer comprises a 3′ cap, a 5′ cap, and/or an inverted deoxythymidine at the 3′ terminus.

[0258] In some embodiments, a PDGF aptamer comprises at least one modified internucleoside linkage. In some embodiments, at least one, at least two, at least three, at least four, or at least five internucleoside linkages are phosphorothioate linkages.

[0259] In some embodiments, a PDGF aptamer has a sequence selected from the sequences shown in Tables 1, 2 and 6 to 9 (SEQ ID NOS: 1 to 499 and 517 to 545). In some embodiments, a PDGF aptamer has a sequence selected from the sequences shown in Table 1 and the sequences shown in Tables 6 to 9 that bind PDGF with an affinity (K_{d}) of less than 10 nM. In some embodiments, a PDGF aptamer has a sequence that is at least 90%, at least 91%, at least 92%, at least 93%, at least 94%, at least 95%, at least 96%, at least 97%, at least 98%, at least 99%, or 100% identical to the sequences shown in Tables 1, 2, and 6 to 9 (SEQ ID NOS: 1 to 1 to 499 and 517 to 545). In some embodiments, a PDGF aptamer has a sequence that is at least 90%, at least 91%, at least 92%, at least 93%, at least 94%, at least 95%, at least 96%, at least 97%, at least 98%, at least 99%, or 100% identical to the sequences shown in Table 1 and the sequences shown in Tables 6 to 9 that bind PDGF with an affinity (K_{d}) of less than 10 nM.

[0260] The terms “sequence identity”, “percent sequence identity”, “percent identity”, “% identical”, “% identity”, and variations thereof, when used in the context of two nucleic acid sequences, are used interchangeably to refer to the number of nucleotide bases that are the same in a query nucleic acid or a portion of a query nucleic acid, when it is compared and aligned for maximum correspondence to a reference nucleic acid, divided by either (1) the number of nucleotide bases in the query sequence between and including the most 5′ corresponding (i.e., aligned) nucleotide base and the most 3′ corresponding (i.e., aligned) nucleotide base, or (2) the total length of the reference sequence, whichever is greater. Exemplary alignment of sequences for comparison can be conducted, e.g., by the local homology algorithm of Smith and Waterman (1981) Adv. Appl. Math. 2:482, by the homology alignment algorithm of Needleman and Wunsch (1970) J. Mol. Biol. 48:443, by the search for similarity method of Pearson and Lipman (1988) Proc. Nat'l. Acad. Sci. USA 85:2444, by computerized implementations of these algorithms (GAP, BESTFIT, FASTA, and TFASTA in the Wisconsin Genetics Software Package, Genetics Computer Group, 575 Science Dr., Madison, Wis.), or by visual inspection (see generally, Ausubel, F. M. et al. (1987), Current Protocols in Molecular Biology, Greene Publishing Assoc. and Wiley-Interscience).

[0261] One example of an algorithm that is suitable for determining percent sequence identity is the algorithm used in the basic local alignment search tool (hereinafter “BLAST”), see, e.g. Altschul et al. (1990) J. Mol. Biol. 215:403 and Altschul et al. (1997) Nucleic Acids Res. 15:3389. Software for performing BLAST analyses is publicly available through the National Center for Biotechnology Information (hereinafter “NCBI”). The default parameters used in determining sequence identity using the software available from NCBI, e.g., BLASTN (for nucleotide sequences) are described in McGinnis et al. (2004) Nucleic Acids Res. 32:W20.

[0262] As used herein, when describing the percent identity of a nucleic acid, such as a PDGF aptamer, the sequence of which is at least, for example, about 95% identical to a reference nucleotide sequence, it is intended that the nucleic acid sequence is identical to the reference sequence except that the nucleic acid sequence may include up to five point mutations per each 100 nucleotides of the reference nucleic acid sequence. In other words, to obtain a desired nucleic acid sequence, the sequence of which is at least about 95% identical to a reference nucleic acid sequence, up to 5% of the nucleotides in the reference sequence may be deleted or substituted with another nucleotide, or some number of nucleotides up to 5% of the total number of nucleotides in the reference sequence may be inserted into the reference sequence (referred to herein as an insertion). These mutations of the reference sequence to generate the desired sequence may occur at the 5′ or 3′ terminal positions of the reference nucleotide sequence or anywhere between those terminal positions, interspersed either individually among nucleotides in the reference sequence or in one or more contiguous groups within the reference sequence. Further, it is intended that a nucleotide base is considered “identical” for the purposes of determining percent identity, when the nucleotide base (1) is the same as the nucleotide base in the reference sequence, or (2) is derived from the nucleotide base in the reference sequence, or (3) is derived from the same nucleotide base from which the nucleotide base in the reference sequence is derived. For example, 5-methyl cytosine is considered to be “identical” to cytosine for the purposes of calculating percent identity. Similarly, the modified uridines shown in FIG. 12 are considered to be identical to one another for the purpose of determining percent identity. The reference sequence may be any one of the nucleotide sequences shown in SEQ ID NOS: 1 to 437.

[0263] In some embodiments, the present disclosure provides a PDGF aptamer that, upon binding PDGF, modulates a PDGF function. In some embodiments, a PDGF aptamer described herein inhibits PDGF-mediated phosphorylation of a PDGF receptor, such as PDGF Rα or PDGF Rβ. In some embodiments, a PDGF aptamer described herein inhibits PDGF-mediated phosphorylation of PDGF RP. In various embodiments, the PDGF aptamer modulates a PDGF function in vivo, such as inhibiting PDGF-mediated receptor phosphorylation in vivo. In various embodiments, the PDGF aptamer has a sequence selected from the sequences of SEQ ID NOS: 1 to 437. In various embodiments, the PDGF aptamer is selected from the aptamers shown in Tables 1 and 2. In various embodiments, the PDGF aptamer is selected from the aptamers shown in Table 1. In some embodiments, the PDGF aptamer comprises at least 12, at least 13, at least 14, at least 15, at least 16, at least 17, at least 18, at least 19, at least 20, at least 21, at least 21, at least 22, at least 23, at least 24, at least 25, at least 26, at least 27, at least 28, at least 29, or at least 30 contiguous nucleotides of a sequence selected from SEQ ID NOS: 1 to 1 to 499 and 517 to 545. In some embodiments, a PDGF aptamer consists of at least 12, at least 13, at least 14, at least 15, at least 16, at least 17, at least 18, at least 19, at least 20, at least 21, at least 21, at least 22, at least 23, at least 24, at least 25, at least 26, at least 27, at least 28, at least 29, or at least 30 contiguous nucleotides that are identical in nucleobase sequence to a sequence selected from SEQ ID NOS: 1 to 1 to 499 and 517 to 545. In some embodiments, the PDGF aptamer comprises at least 12, at least 13, at least 14, at least 15, at least 16, at least 16, at least 17, at least 18, at least 19, at least 20, at least 21, at least 21, at least 22, at least 23, at least 24, at least 25, at least 26, at least 27, at least 28, at least 29, or at least 30 contiguous nucleotides of an aptamer shown in Table 1, 2, 6, 7, 8 or 9. In some embodiments, the PDGF aptamer comprises at least 12, at least 13, at least 14, at least 15, at least 16, at least 17, at least 18, at least 19, at least 20, at least 21, at least 21, at least 22, at least 23, at least 24, at least 25, at least 26, at least 27, at least 28, at least 29, or at least 30 contiguous nucleotides of an aptamer shown in Table 1 or an aptamer shown in one of Tables 6 to 9 that binds PDGF with an affinity (K_{d}) of less than 10 nM. In some embodiments, a PDGF aptamer consists of at least 12, at least 13, at least 14, at least 15, at least 16, at least 17, at least 18, at least 19, at least 20, at least 21, at least 21, at least 22, at least 23, at least 24, at least 25, at least 26, at least 27, at least 28, at least 29, or at least 30 contiguous nucleotides of an aptamer shown in Table 1, 2, 6, 7, 8 or 9. In some embodiments, a PDGF aptamer consists of at least 12, at least 13, at least 14, at least 15, at least 16, at least 17, at least 18, at least 19, at least 20, at least 21, at least 21, at least 22, at least 23, at least 24, at least 25, at least 26, at least 27, at least 28, at least 29, or at least 30 contiguous nucleotides of an aptamer shown in Table 1 or an aptamer shown in one of Tables 6 to 9 that binds PDGF with an affinity (K_{d}) of less than 10 nM.

[0264] In some embodiments, a PDGF aptamer has a nucleobase sequence selected from the sequences of SEQ ID NOS. 500 to 512; 761 and 762. In some embodiments, a PDGF aptamer has the sequence of any one of SEQ ID NOS: 1 to 1 to 499 and 517 to 545. In some embodiments, a PDGF aptamer is at least 95% identical, at least 90% identical, at least 85% identical, at least 80% identical, or at least 75% identical to any one of SEQ ID NOS: 1 to 499 and 517 to 545. In any of the embodiments herein, a PDGF aptamer may comprise additional nucleotides or other chemical moieties on the 5′ end, the 3′ end, or both the 5′ and the 3′ end of the aptamer.

[0265] The PDGF aptamer can contain any number of nucleotides in addition to the PDGF binding region. In various embodiments, the PDGF aptamer can include up to about 100 nucleotides, up to about 95 nucleotides, up to about 90 nucleotides, up to about 85 nucleotides, up to about 80 nucleotides, up to about 75 nucleotides, up to about 70 nucleotides, up to about 65 nucleotides, up to about 60 nucleotides, up to about 55 nucleotides, up to about 50 nucleotides, up to about 45 nucleotides, up to about 40 nucleotides, up to about 35 nucleotides, up to about 30 nucleotides, up to about 25 nucleotides, or up to about 20 nucleotides.

[0266] In some embodiments, the PDGF aptamer is selected from an aptamer that has similar binding characteristics and ability to treat PDGF associated atherosclerosis, macular degeneration, fibrosis, or cancer conditions as an aptamer selected from SEQ ID NOS: 1 to 499 and 517 to 545. In some embodiments, a PDGF aptamer binds to the same region of a PDGF-B monomer (in the context of a PDGF-BB or PDGF-AB dimer) as an aptamer selected from the aptamers shown in Tables 1, 2, and 6 to 9. In some embodiments, a PDGF aptamer binds to the same region of a PDGF-B monomer (in the context of a PDGF-BB or PDGF-AB dimer) as an aptamer selected from the aptamers shown in Table 1. In some embodiments, a PDGF aptamer binds to the same region of a PDGF-B monomer (in the context of a PDGF-BB or PDGF-AB dimer) as an aptamer selected from the aptamers shown in Table 6. In some embodiments, a PDGF aptamer binds to the same region of a PDGF-B monomer (in the context of a PDGF-BB or PDGF-AB dimer) as PDGF aptamer 4149-8_260. In some embodiments, a PDGF aptamer binds to a region of PDGF-B comprising amino acids 24 to 86 of PDGF-B. In some such embodiments, the PDGF aptamer competes for binding to PDGF with PDGF aptamer 4149-8_260. In some embodiments, a PDGF aptamer binds to PDGF-B with less than 15%, less than 14%, less than 13%, less than 12%, less than 11%, less than 10%, less than 9%, less than 8%, less than 7%, or less than 6% polar contacts to protein contact atoms. Polar contacts are defined as the sum of hydrogen bonds and charge-charge interactions. In some embodiments, a PDGF aptamer binds to PDGF-B with a ratio of polar contacts to interface area of less than 0.01, less than 0.009, less than 0.008, less than 0.007, or less than 0.006. In some embodiments, a PDGF aptamer binds to the same region of a PDGF-B monomer (in the context of a PDGF-BB or PDGF-AB dimer) as PDGF aptamer 5169-4_26.

[0267] In some embodiments, a PDGF aptamer has any combination of the following characteristics:

(a) binds to a region of PDGF-B comprising amino acids 24 to 86 of PDGF-B;
(b) competes for binding to PDGF with PDGF aptamer 4149-8_260;
(c) competes for binding to PDGF with PDGF aptamer 5169-4_26;
(d) binds to PDGF-B with a ratio of polar contacts to interface area of less than 0.01, less than 0.009, less than 0.008, less than 0.007, or less than 0.006; and/or
(e) binds to PDGF-B with less than 15%, less than 14%, less than 13%, less than 12%, less than 11%, less than 10%, less than 9%, less than 8%, less than 7%, or less than 6% polar contacts to protein contact atoms.

[0268] The PDGF aptamer can be selected to have any suitable dissociation constant (K_{d)}for PDGF. In some embodiments, a PDGF aptamer has a dissociation constant (K_{d}) for PDGF of less than 30 nM, less than 25 nM, less than 20 nM, less than 15 nM, less than 10 nM, less than 9 nM, less than 8 nM, less than 7 nM, less than 6 nM, less than 5 nM, less than 4 nM, less than 3 nM, less than 2 nM, or less than 1 nM. Dissociation constants may be determined with a binding assay using a multi-point titration and fitting the equation y=(max−min)(Protein)/(K_{d}+Protein)+min as described in Example 3, below. In some embodiments, the PDGF aptamer is an aptamer with a K that is less than or equal to the K_{d} of an aptamer shown in any one of Tables 1, 2 or 6 to 9. In some embodiments, the PDGF aptamer is an aptamer with a K_{d} that is less than or equal to the K_{d} of an aptamer shown in Table 1 or Table 6.

[0269] Aptamer 4149-8_1 binds in a 1:1 stoichiometry with a PDGF monomer. Since PDGF forms a tight homodimer that is required for reaction with its target receptors, a more efficient inhibition of PDGF activity might be achieved by using a dimeric or other multimeric form of aptamer 4149-8_1. Thus, in some embodiments, the PDGF aptamer is a multimerization of any combination of the sequences of aptamer 4149-8_1, 4149-8_379, and SEQ ID NOS 500 to 512. In some embodiments, an aptamer construct comprises a first aptamer selected from any of the PDGF aptamers described herein, and a second aptamer comprising any of the PDGF aptamers described herein, wherein the first aptamer and the second aptamer may be the same or different. The first aptamer and the second aptamer of the PDGF aptamer construct may be covalently or noncovalently linked. Nonlimiting exemplary linkages are known in the art and/or are described herein. In some embodiments, a PDGF aptamer construct may be capable of binding two PDGF monomers simultaneously. In some embodiments, a PDGF aptamer construct binds PDGF with an affinity (K_{d}) of less than 10 nM.

### Exemplary VEGF Aptamers

[0270] The VEGF aptamers of the instant disclosure were identified using the improved SELEX method for identifying aptamers having slow off-rates as described in Example 7, which describes a representative method for the selection and production of an aptamer that binds VEGF with a slow dissociation rate.

[0271] We truncated a clone from a Nap-dU VEGF-121 SELEX experiment to a minimal sequence of 29 nucleotides. This SOMAmer binds to both VEGF-121 and VEGF-165 with high affinity (K_{d} values of 90 pM and 20 pM, respectively). The SOMAmer also potently inhibits the ability of both VEGF isoforms to induce VEGFR2 phosphorylation in human umbilical vein endothelial cells in vitro (see Example 9), supporting the notion that it binds to and blocks the receptor-binding domain on VEGF.

[0272] The present disclosure provides the first identification of an inhibitory aptamer to VEGF-121. Thus, the present VEGF aptamers represent broad inhibitors of VEGF, similar to protein-based drugs like bevacizumab (Avastin®), ranibizumab (Lucentis®) and aflibercept (Eylea®) (Papadopoulos et al. (2012) Angiogenesis 15:171; Yu et al. (2011) Biochem. Biophys. Res. Commun. 408:276. Thus, the present VEGF aptamers may more effectively inhibit VEGF signaling than Macugen®, which is a selective inhibitor of VEGF-165.

[0273] A truncated clone from the successful Nap-dU VEGF-121 SELEX experiment provided a sequence of 29 nucleotides. This aptamer (or SOMAmer) (4867-31 binds to both VEGF-121 and VEGF-165 with high affinity (K_{d} values of 90 pM and 20 pM, respectively). This SOMAmer also potently inhibits the ability of both VEGF isoforms to induce VEGFR2 phosphorylation in human umbilical vein endothelial cells in vitro, supporting the concept that it binds to and blocks the receptor-binding domain on VEGF.

[0274] Aptamer 4867-31_192 binds in a 1:1 stoichiometry with a VEGF monomer. Since VEGF forms a tight homodimer that is required for reaction with its target receptors, a more efficient inhibition of VEGF activity might be achieved by using a dimeric or other multimeric form of aptamer 4867-31_192. Thus, in some embodiments, the VEGF aptamer is a multimerization of any combination of the sequences of aptamer 4867-31_192, SEQ ID NOS 513 to 516. In some embodiments, an aptamer construct comprises a first aptamer selected from any of the VEGF aptamers described herein, and a second aptamer comprising any of the VEGF aptamers described herein, wherein the first aptamer and the second aptamer may be the same or different. The first aptamer and the second aptamer of the VEGF aptamer construct may be covalently or noncovalently linked. Nonlimiting exemplary linkages are known in the art and/or are described herein. In some embodiments, a VEGF aptamer construct may be capable of binding two VEGF monomers simultaneously. In some embodiments, a VEGF aptamer construct binds VEGF with an affinity (K_{d}) of less than 10 nM.

[0275] In some embodiments, a VEGF aptamer binds VEGF-121 with a K_{d} of less than 10 nM. In some embodiments, the VEGF aptamer comprises one or more modified nucleotides.

[0276] In some embodiments, the VEGF aptamer comprises one or more modified nucleotides comprising hydrophobic modification. In some embodiments, the VEGF aptamer comprises one or more modified pyrimidines. In some embodiments, the VEGF aptamer comprises one or more modified pyrimidines shown in FIG. 12. In some embodiments, the VEGF aptamer comprises one or more modified pyrimidines shown in FIG. 12, groups II to V. In some embodiments, the VEGF aptamer comprises one or more modified pyrimidines shown in FIG. 12, groups III to V. In some embodiments, the VEGF aptamer comprises one or more modified pyrimidines shown in FIG. 12, groups III and IV. In some embodiments, the VEGF aptamer comprises one or more (N-naphthylmethylcarboxyamide)-2′-deoxyuridines (NapdUs).

[0277] In some embodiments, a VEGF aptamer comprises the sequence:

(SEQ ID NO. 513)

5′-GZZQAAEZECZZEZDRGAZZZAAAZGG-3′

wherein each Z is a modified pyrimidine;
Q is selected from any modified or unmodified nucleotide and a substituted or unsubstituted C₂-C₅₀ linker, or is absent;
each E is independently selected from a G and a substituted or unsubstituted C₂-C₅₀ linker;
D is selected from A and a substituted or unsubstituted C₂-C₅₀ linker; and
R is selected from any modified or unmodified nucleotide and a substituted or unsubstituted C₂-C₅₀ linker.

[0278] In some embodiments, a VEGF aptamer comprises a sequence selected from:

(SEQ ID NO. 514)

5′-CGZZQAAEZECZZEZDRGAZZZAAAZG-3′;

(SEQ ID NO. 513)

5′-GZZQAAEZECZZEZDRGAZZZAAAZGG-3′;

(SEQ ID NO. 515)

5′-CGZZQAAEZECZZEZDRGAZZZAAAZGG-3′;
and

(SEQ ID NO. 516)

5′-CCGZZQAAEZECZZEZDRGAZZZAAAZGG-3′;

wherein Z, Q, E, D, and R are as defined above.

[0279] In some embodiments, Z is a modified uridine. In some embodiments, each Z is independently selected from the C-5 modified pyrimidines as defined herein. In some embodiments, each Z is independently selected from:
[0280] 5-(N-benzylcarboxyamide)-2′-deoxyuridine (BndU),
[0281] 5-(N-benzylcarboxyamide)-2′-O-methyluridine,
[0282] 5-(N-benzylcarboxyamide)-2′-fluorouridine,
[0283] 5-(N-phenethylcarboxyamide)-2′-deoxyuridine (PEdU),
[0284] 5-(N-thiophenylmethylcarboxyamide)-2′-deoxyuridine (ThdU),
[0285] 5-(N-isobutylcarboxyamide)-2′-deoxyuridine (iBudU),
[0286] 5-(N-tyrosylcarboxyamide)-2′-deoxyuridine (TyrdU),
[0287] 5-(N-3,4-methylenedioxybenzylcarboxyamide)-2′-deoxyuridine (MBndU),
[0288] 5-(N-4-fluorobenzylcarboxyamide)-2′-deoxyuridine (FBndU),
[0289] 5-(N-3-phenylpropylcarboxyamide)-2′-deoxyuridine (PPdU),
[0290] 5-(N-imidizolylethylcarboxyamide)-2′-deoxyuridine (ImdU),
[0291] 5-(N-isobutylcarboxyamide)-2′-O-methyluridine,
[0292] 5-(N-isobutylcarboxyamide)-2′-fluorouridine,
[0293] 5-(N-tryptaminocarboxyamide)-2′-deoxyuridine (TrpdU),
[0294] 5-(N—R-threoninylcarboxyamide)-2′-deoxyuridine (ThrdU),
[0295] 5-(N-tryptaminocarboxyamide)-2′-O-methyluridine,
[0296] 5-(N-tryptaminocarboxyamide)-2′-fluorouridine,
[0297] 5-(N-[1-(3-trimethylamonium) propyl]carboxyamide)-2′-deoxyuridine chloride,
[0298] 5-(N-naphthylmethylcarboxyamide)-2′-deoxyuridine (NapdU),
[0299] 5-(N-naphthylmethylcarboxyamide)-2′-O-methyluridine,
[0300] 5-(N-naphthylmethylcarboxyamide)-2′-fluorouridine,
[0301] 5-(N-[1-(2,3-dihydroxypropyl)]carboxyamide)-2′-deoxyuridine),
[0302] 5-(N-2-naphthylmethylcarboxyamide)-2′-deoxyuridine (2NapdU),
[0303] 5-(N-2-naphthylmethylcarboxyamide)-2′-O-methyluridine,
[0304] 5-(N-2-naphthylmethylcarboxyamide)-2′-fluorouridine,
[0305] 5-(N-1-naphthylethylcarboxyamide)-2′-deoxyuridine (NEdU),
[0306] 5-(N-1-naphthylethylcarboxyamide)-2′-O-methyluridine,
[0307] 5-(N-1-naphthylethylcarboxyamide)-2′-fluorouridine,
[0308] 5-(N-2-naphthylethylcarboxyamide)-2′-deoxyuridine (2NEdU),
[0309] 5-(N-2-naphthylethylcarboxyamide)-2′-O-methyluridine,
[0310] 5-(N-2-naphthylethylcarboxyamide)-2′-fluorouridine,
[0311] 5-(N-3-benzofuranylethylcarboxyamide)-2′-deoxyuridine (BFdU),
[0312] 5-(N-3-benzofuranylethylcarboxyamide)-2′-O-methyluridine,
[0313] 5-(N-3-benzofuranylethylcarboxyamide)-2′-fluorouridine,
[0314] 5-(N-3-benzothiophenylethylcarboxyamide)-2′-deoxyuridine (BTdU),
[0315] 5-(N-3-benzothiophenylethylcarboxyamide)-2′-O-methyluridine, and
[0316] 5-(N-3-benzothiophenylethylcarboxyamide)-2′-fluorouridine.

[0317] In some embodiments, each Z is independently selected from the modified pyrimidines shown in FIG. 12, groups II to V. In some embodiments, each Z is independently selected from the modified pyrimidines shown in FIG. 12, groups III to V. In some embodiments, at least one, at least two, at least three, at least four, at least five, at least six, at least seven, or at least eight Zs are 5-(N-naphthylmethylcarboxyamide)-2′-deoxyuridine (NapdU). In some embodiments, each Z is independently selected from the modified pyrimidines shown in FIG. 12, groups III to IV. In some embodiments, each Z is 5-(N-naphthylmethylcarboxyamide)-2′-deoxyuridine (NapdU).

[0318] A C₂-C₅₀ linker or spacer may be a backbone comprising a chain of 2 to 50 carbon atoms (C₂-C₅₀) (saturated, unsaturated, straight chain, branched or cyclic), 0 to 10 aryl groups, 0 to 10 heteroaryl groups, and 0 to 10 heterocyclic groups, optionally comprising an ether (—O—) linkage, (e.g., one or more alkylene glycol units, including but not limited to one or more ethylene glycol units —O—(CH₂CH₂O)—; one or more 1,3-propane diol units —O—(CH₂CH₂CH₂O)—. etc.); an amine (—NH—) linkage; an amide (—NC(O)—) linkage; and a thioether (—S—) linkage; etc.; wherein each backbone carbon atom may be independently unsubstituted (i.e., comprising —H substituents) or may be substituted with one or more groups selected from a C₁ to C₃ alkyl, —OH, —NH₂, —SH, —O—(C₁ to C₆ alkyl), —S—(C₁ to C₆ alkyl), halogen, —OC(O)(C₁ to C₆ alkyl), —NH—(C₁ to C₆ alkyl), and the like. In some embodiments, a C₂-C₅₀ linker is a C₂-C₂₀ linker, a C₂-C₁₀ linker, a C₂-C₈ linker, a C₂-C₆ linker, a C₂-C₅ linker, a C₂-C₄ linker, or a C₃ linker, wherein each carbon may be independently substituted as described above.

[0319] In some embodiments, each substituted or unsubstituted C₂-C₅₀ linker is independently selected from a substituted or unsubstituted C₂-C₂₀ linker, a substituted or unsubstituted C₂-C₁₀ linker, a substituted or unsubstituted C₂-C₈ linker, a substituted or unsubstituted C₂-C₆ linker, a substituted or unsubstituted C₂-C₅ linker, a substituted or unsubstituted C₂-C₄ linker, and a substituted or unsubstituted C₃ linker. In some embodiments, each substituted or unsubstituted C₂-C₅₀ linker is a substituted or unsubstituted C₂-C₁₀ linker. In some such embodiments, each substituted or unsubstituted C₂-C₁₀ linker is a substituted or unsubstituted C₂-C₈ linker, a substituted or unsubstituted C₂-C₆ linker, a substituted or unsubstituted C₂-C₅ linker, a substituted or unsubstituted C₂-C₄ linker, or a substituted or unsubstituted C₃ linker.

[0320] In some embodiments, one or more nucleosides of a VEGF aptamer comprise a modification selected from a 2′-position sugar modification (such as a 2′-amino (2′-NH₂), a 2′-fluoro (2′-F), or a 2′-O-methyl (2′-OMe)), a modification at a cytosine exocyclic amine, an internucleoside linkage modification, and a 5-methyl-cytosine. In some embodiments, a VEGF aptamer comprises a 3′ cap, a 5′ cap, and/or an inverted deoxythymidine at the 3′ terminus.

[0321] In some embodiments, a VEGF aptamer comprises at least one modified internucleoside linkage. In some embodiments, at least one, at least two, at least three, at least four, or at least five internucleoside linkages are phosphorothioate linkages.

[0322] In some embodiments, a VEGF aptamer has a sequence selected from the sequences shown in Tables 10 to 14. In some embodiments, a VEGF aptamer has a sequence selected from the sequences shown in Tables 10 to 14 that have a K_{d} of less than 10 nM. In some embodiments, a VEGF aptamer has a sequence that is at least 90%, at least 91%, at least 92%, at least 93%, at least 94%, at least 95%, at least 96%, at least 97%, at least 98%, at least 99%, or 100% identical to the sequences shown in Tables 10 to 14. In some embodiments, a VEGF aptamer has a sequence that is at least 90%, at least 91%, at least 92%, at least 93%, at least 94%, at least 95%, at least 96%, at least 97%, at least 98%, at least 99%, or 100% identical to the sequences shown in Tables 10 to 14 that have a K_{d} of less than 10 nM. Percent identity is determined as described above for PDGF aptamers, except that the reference sequences are the VEGF aptamer sequences shown in Tables 10 to 14, such as the sequences that have a K_{d} of less than 10 nM.

[0323] In some embodiments, the present disclosure provides a VEGF aptamer that, upon binding VEGF, modulates a VEGF function. In some embodiments, a VEGF aptamer inhibits VEGF-mediated phosphorylation of a VEGF receptor, such as VEGFR1 or VEGFR2.

[0324] In some embodiments, a VEGF aptamer inhibits VEGF-mediated phosphorylation of VEGF receptor. In various embodiments, the VEGF aptamer modulates a VEGF function in vivo, such as inhibiting VEGF-mediated receptor phosphorylation in vivo. In various embodiments, the VEGF aptamer has a sequence selected from the sequences shown in Tables 10 to 14. In various embodiments, the VEGF aptamer is selected from the aptamers shown in Tables 10 to 14 that have a K_{d} of less than 10 nM. In various embodiments, the VEGF aptamer is selected from the aptamers shown in Tables 10 to 14. In some embodiments, the VEGF aptamer comprises at least 12, at least 13, at least 14, at least 15, at least 16, at least 17, at least 18, at least 19, at least 20, at least 21, at least 21, at least 22, at least 23, at least 24, at least 25, at least 26, at least 27, at least 28, at least 29, or at least 30 contiguous nucleotides of a sequence shown in Tables 10 to 14 that have a K_{d} of less than 10 nM. In some embodiments, a VEGF aptamer consists of at least 12, at least 13, at least 14, at least 15, at least 16, at least 17, at least 18, at least 19, at least 20, at least 21, at least 21, at least 22, at least 23, at least 24, at least 25, at least 26, at least 27, at least 28, at least 29, or at least 30 contiguous nucleotides that are identical in nucleobase sequence to a sequence shown in Tables 10 to 14 that have a K_{d} of less than 10 nM. In some embodiments, the VEGF aptamer comprises at least 12, at least 13, at least 14, at least 15, at least 16, at least 17, at least 18, at least 19, at least 20, at least 21, at least 21, at least 22, at least 23, at least 24, at least 25, at least 26, at least 27, at least 28, at least 29, or at least 30 contiguous nucleotides of an aptamer shown in Tables 10 to 14. In some embodiments, the VEGF aptamer comprises at least 12, at least 13, at least 14, at least 15, at least 16, at least 17, at least 18, at least 19, at least 20, at least 21, at least 21, at least 22, at least 23, at least 24, at least 25, at least 26, at least 27, at least 28, at least 29, or at least 30 contiguous nucleotides of an aptamer shown in Tables 10 to 14 that have a K_{d} of less than 10 nM. In some embodiments, a VEGF aptamer consists of at least 12, at least 13, at least 14, at least 15, at least 16, at least 17, at least 18, at least 19, at least 20, at least 21, at least 21, at least 22, at least 23, at least 24, at least 25, at least 26, at least 27, at least 28, at least 29, or at least 30 contiguous nucleotides of an aptamer shown in Tables 10 to 14. In some embodiments, a VEGF aptamer consists of at least 12, at least 13, at least 14, at least 15, at least 16, at least 17, at least 18, at least 19, at least 20, at least 21, at least 21, at least 22, at least 23, at least 24, at least 25, at least 26, at least 27, at least 28, at least 29, or at least 30 contiguous nucleotides of an aptamer shown in Tables 10 to 14 that have a K_{d} of less than 10 nM.

[0325] In any of the embodiments herein, a VEGF aptamer may comprise additional nucleotides or other chemical moieties on the 5′ end, the 3′ end, or both the 5′ and the 3′ end of the aptamer.

[0326] The VEGF aptamer can contain any number of nucleotides in addition to the VEGF binding region. In various embodiments, the VEGF aptamer can include up to about 100 nucleotides, up to about 95 nucleotides, up to about 90 nucleotides, up to about 85 nucleotides, up to about 80 nucleotides, up to about 75 nucleotides, up to about 70 nucleotides, up to about 65 nucleotides, up to about 60 nucleotides, up to about 55 nucleotides, up to about 50 nucleotides, up to about 45 nucleotides, up to about 40 nucleotides, up to about 35 nucleotides, up to about 30 nucleotides, up to about 25 nucleotides, or up to about 20 nucleotides.

[0327] In some embodiments, the VEGF aptamer is selected from an aptamer that has similar binding characteristics and ability to treat VEGF associated atherosclerosis, macular degeneration, fibrosis, and cancer conditions as an aptamer shown in Tables 10 to 14 have a K_{d} of less than 10 nM. In some embodiments, a VEGF aptamer binds to the same region of VEGF-121 as an aptamer selected from the aptamers shown in Tables 10 to 14 that have a K_{d} of less than 10 nM. In some embodiments, a VEGF aptamer binds to the same region of a VEGF-121 as a VEGF aptamer shown in Table 10, 11, 12, 13 or 14 that have a K_{d} of less than 10 nM. In some embodiments, a VEGF aptamer binds to the same region of VEGF-121 as VEGF aptamer 4867-31_183.

[0328] The VEGF aptamer can be selected to have any suitable dissociation constant (K_{d}) for VEGF. In some embodiments, a VEGF aptamer has a dissociation constant (K_{d}) for VEGF-121 of less than 30 nM, less than 25 nM, less than 20 nM, less than 15 nM, less than 10 nM, less than 9 nM, less than 8 nM, less than 7 nM, less than 6 nM, less than 5 nM, less than 4 nM, less than 3 nM, less than 2 nM, or less than 1 nM. Dissociation constants may be determined with a binding assay using a multi-point titration and fitting the equation y=(max−min)(Protein)/(K_{d}+Protein)+min as described in Example 3, below.

[0329] In some embodiments, an aptamer construct comprises a first aptamer selected from any of the VEGF aptamers described herein, and a second aptamer comprising any of the VEGF aptamers described herein, wherein the first aptamer and the second aptamer may be the same or different. The first aptamer and the second aptamer of the VEGF aptamer construct may be covalently or noncovalently linked. Nonlimiting exemplary linkages are known in the art and/or are described herein. In some embodiments, a VEGF aptamer construct may be capable of binding two VEGF monomers simultaneously. In some embodiments, a VEGF aptamer construct binds VEGF with an affinity (K_{d}) of less than 10 nM.

### Exemplary PDGF/VEGF Aptamer Constructs

[0330] There is considerable evidence that more efficient blocking of tumor-associated and ocular angiogenesis, coupled with new blood vessel regression, is possible with combined inhibition of VEGF and PDGF-B signaling pathways (Bergers, G., et al. (2003) J. Clin. Invest. 111:1287; Jo, N., et al. (2006) Am. J. Pathol. 168:2036). This effect is mediated by the disruption of tight cell-cell association between endothelial cells, which form initial capillary sprouts, and periendothelial cells (or pericytes), which encircle the new blood vessels as they mature, rendering the blood vessels less susceptible to VEGF inhibitors (Benjamin, L. E., et al. (1998) Development 125:1591; Benjamin, L. E., et al. (1999) J. Clin. Invest. 103:159). The aptamers described herein can form the basis of such a dual inhibitor. In some embodiments, a PDGFNEGF aptamer construct comprises any of the PDGF aptamers described herein linked to any of the VEGF aptamers described herein. In some embodiments, a PDGFNEGF aptamer construct comprises any of the PDGF aptamers shown in Table 1 linked to any of the VEGF aptamers shown in Table 10 to 14 that have a K_{d} less than 10 nM. The linkage may be covalent or noncovalent.

[0331] The PDGFNEGF aptamer construct may comprise a PDGF aptamer and a VEGF aptamer in any orientation, such as a PDGF aptamer linked at or near its 3′ end to a point at or near the 5′ end of a VEGF aptamer, or a VEGF aptamer linked at or near its 3′ end to a point at or near the 5′ end of a PDGF aptamer, or any other orientation that preserves the binding properties of each aptamer of the construct.

[0332] In some embodiments in which the linkage is covalent, the PDGFNEGF aptamer construct may be linked through a phosphate or phosphorothioate linkage. Many other covalent linkages are also contemplated, such as linkages through various linker moieties, including, but not limited to, hexaethylene glycol linkers, polyethylene glycol linkers, substituted or unsubstituted hydrocarbon linkers, etc. One skilled in the art can select a suitable covalent linkage for linking a PDGF aptamer to a VEGF aptamer.

[0333] In some embodiments, the PDGF aptamer and the VEGF aptamer are linked via a noncovalent linkage. Noncovalent linkages include, but are not limited to, biotin/streptavidin; metal-binding peptides/metals; hybridizable modified and/or unmodified oligonucleotides; etc. One of ordinary skill in the art can select a suitable noncovalent linkage for linking a PDGF aptamer to a VEGF aptamer.

### Pharmaceutical Compositions Comprising Aptamers and Aptamer Constructs

[0334] In some embodiments, pharmaceutical compositions comprising at least one aptamer or aptamer construct described herein and at least one pharmaceutically acceptable carrier are provided. Suitable carriers are described in “Remington: The Science and Practice of Pharmacy, Twenty-first Edition,” published by Lippincott Williams & Wilkins, which is incorporated herein by reference. Pharmaceutical compositions that include at least one aptamer or aptamer construct described herein and at least one pharmaceutically acceptable carrier may also include one or more active agents that is not a PDGF or VEGF inhibitor.

[0335] The aptamers described herein can be utilized in any pharmaceutically acceptable dosage form, including, but not limited to, injectable dosage forms, liquid dispersions, gels, aerosols, ointments, creams, lyophilized formulations, dry powders, tablets, capsules, controlled release formulations, fast melt formulations, delayed release formulations, extended release formulations, pulsatile release formulations, mixed immediate release and controlled release formulations, etc. Specifically, the aptamers described herein can be formulated: (a) for administration selected from any of oral, pulmonary, intravenous, intra-arterial, intrathecal, intra-articular, rectal, ophthalmic, colonic, parenteral, intracisternal, intravaginal, intraperitoneal, local, buccal, nasal, and topical administration; (b) into a dosage form selected from any of liquid dispersions, gels, aerosols, ointments, creams, tablets, sachets and capsules; (c) into a dosage form selected from any of lyophilized formulations, dry powders, fast melt formulations, controlled release formulations, delayed release formulations, extended release formulations, pulsatile release formulations, and mixed immediate release and controlled release formulations; or (d) any combination thereof.

[0336] Solutions or suspensions used for parenteral, intradermal, or subcutaneous application can comprise one or more of the following components: (1) a sterile diluent such as water for injection, saline solution, fixed oils, polyethylene glycols, glycerine, propylene glycol or other synthetic solvents; (2) antibacterial agents such as benzyl alcohol or methyl parabens; (3) antioxidants such as ascorbic acid or sodium bisulfite; (4) chelating agents such as ethylenediaminetetraacetic acid; (5) buffers such as acetates, citrates or phosphates; and (5) agents for the adjustment of tonicity such as sodium chloride or dextrose. The pH can be adjusted with acids or bases, such as hydrochloric acid or sodium hydroxide. A parenteral preparation can be enclosed in ampoules, disposable syringes or multiple dose vials made of glass or plastic.

[0337] Pharmaceutical compositions suitable for injectable use may include sterile aqueous solutions (where water soluble) or dispersions and sterile powders for the extemporaneous preparation of sterile injectable solutions or dispersion. For intravenous administration, suitable carriers include physiological saline, bacteriostatic water, Cremophor EL (BASF, Parsippany, N.J.) or phosphate buffered saline (PBS). In all cases, the composition should be sterile and should be fluid to the extent that easy syringability exists. The pharmaceutical composition should be stable under the conditions of manufacture and storage and should be preserved against the contaminating action of microorganisms such as bacteria and fungi. The term “stable”, as used herein, means remaining in a state or condition that is suitable for administration to a subject.

[0338] The carrier can be a solvent or dispersion medium, including, for example, water, ethanol, polyol (for example, glycerol, propylene glycol, and liquid polyethylene glycol, and the like), and suitable mixtures thereof. The proper fluidity can be maintained, for example, by the use of a coating such as lecithin, by the maintenance of the required particle size in the case of dispersion, and by the use of surfactants. Prevention of the action of microorganisms can be achieved by various antibacterial and antifungal agents, for example, parabens, chlorobutanol, phenol, ascorbic acid, thimerosal, and the like. In many cases, it will be preferable to include isotonic agents, for example, sugars, polyalcohols such as mannitol or sorbitol, and inorganic salts such as sodium chloride, in the composition. Prolonged absorption of the injectable compositions can be brought about by including in the composition an agent which delays absorption, for example, aluminum monostearate and gelatin.

[0339] Sterile injectable solutions can be prepared by incorporating the active reagent (e.g., an aptamer, and/or an aptamer construct) in an appropriate amount in an appropriate solvent with one or a combination of ingredients enumerated above, as desired, followed by filtered sterilization. Generally, dispersions are prepared by incorporating at least one aptamer, and/or aptamer construct into a sterile vehicle that contains a basic dispersion medium and any other desired ingredient. In the case of sterile powders for the preparation of sterile injectable solutions, exemplary methods of preparation include vacuum drying and freeze-drying, both of which will yield a powder of an aptamer, and/or an aptamer construct plus any additional desired ingredient from a previously sterile-filtered solution thereof.

[0340] In some embodiments, an aptamer, and/or an aptamer construct is formulated for intravitreal injection. Suitable formulations for intravitreal administration are described, e.g., in. Ocular drug delivery is discussed, e.g., in Rawas-Qalaji et al. (2012) Curr. Eye Res. 37: 345; Bochot et al. (2012) J. Control Release 161:628; Yasukawa et al. (2011) Recent Pat. Drug Deliv. Formul. 5:1; and Doshi et al. (2011) Semin. Ophthalmol. 26:104. In some embodiments, a pharmaceutical composition comprising an aptamer, and/or an aptamer construct is administered by intravitreal injection once per week, once per two weeks, once per three weeks, once per four weeks, once per five weeks, once per six weeks, once per seven weeks, once per eight weeks, once per nine weeks, once per 10 weeks, once per 11 weeks, once per 12 weeks, or less often than once per 12 weeks.

[0341] Oral compositions generally include an inert diluent or an edible carrier. They can be enclosed, for example, in gelatin capsules or compressed into tablets. For the purpose of oral therapeutic administration, the aptamer, and/or aptamer construct can be incorporated with excipients and used in the form of tablets, troches, or capsules. Oral compositions can also be prepared using a fluid carrier for use as a mouthwash, wherein the compound in the fluid carrier is applied orally and swished and expectorated or swallowed. Pharmaceutically compatible binding agents, and/or adjuvant materials can be included as part of the composition.

[0342] For administration by inhalation, the compounds are delivered in the form of an aerosol spray from a pressured container or dispenser that contains a suitable propellant, e.g., a gas such as carbon dioxide, a nebulized liquid, or a dry powder from a suitable device. For transmucosal or transdermal administration, penetrants appropriate to the barrier to be permeated are used in the formulation. Such penetrants are generally known in the art, and include, for example, for transmucosal administration, detergents, bile salts, and fusidic acid derivatives. Transmucosal administration can be accomplished through the use of nasal sprays or suppositories. For transdermal administration, the active reagents are formulated into ointments, salves, gels, or creams, as generally known in the art. The reagents can also be prepared in the form of suppositories (e.g., with conventional suppository bases such as cocoa butter and other glycerides) or retention enemas for rectal delivery.

[0343] In some embodiments, an aptamer, and/or an aptamer construct is prepared with a carrier that will protect against rapid elimination from the body. For example, a controlled release formulation can be used, including implants and microencapsulated delivery systems. Biodegradable, biocompatible polymers can be used, such as ethylene vinyl acetate, polyanhydrides, polyglycolic acid, collagen, polyorthoesters, and polylactic acid. Methods for preparation of such formulations will be apparent to those skilled in the art. The materials can also be obtained commercially from Alza Corporation and Nova Pharmaceuticals, Inc.

[0344] Liposomal suspensions (including liposomes targeted to infected cells with monoclonal antibodies to viral antigens) can also be used as pharmaceutically acceptable carriers. These can be prepared according to methods known to those skilled in the art, for example, as described in U.S. Pat. No. 4,522,811.

[0345] Additionally, suspensions of an aptamer, and/or an aptamer construct may be prepared as appropriate oily injection suspensions. Suitable lipophilic solvents or vehicles include fatty oils, such as sesame oil, or synthetic fatty acid esters, such as ethyl oleate, triglycerides, or liposomes. Non-lipid polycationic amino polymers may also be used for delivery. Optionally, the suspension may also include suitable stabilizers or agents to increase the solubility of the compounds and allow for the preparation of highly concentrated solutions.

[0346] In some cases, it may be especially advantageous to formulate oral or parenteral compositions in dosage unit form for ease of administration and uniformity of dosage. Dosage unit form as used herein refers to physically discrete units suited as unitary dosages for the subject to be treated; each unit containing a predetermined quantity of an aptamer and/or aptamer construct calculated to produce the desired therapeutic effect in association with the required pharmaceutical carrier. The specification for the dosage unit forms of aptamers and/or constructs described herein are dictated by and directly dependent on the characteristics of the particular aptamer and/or aptamer construct and the particular therapeutic effect to be achieved, and the limitations inherent in the art of compounding such an active agent for the treatment of individuals.

[0347] Pharmaceutical compositions comprising at least one aptamer, and/or aptamer construct can include one or more pharmaceutical excipients. Examples of such excipients include, but are not limited to, binding agents, filling agents, lubricating agents, suspending agents, sweeteners, flavoring agents, preservatives, buffers, wetting agents, disintegrants, effervescent agents, and other excipients. Such excipients are known in the art. Exemplary excipients include: (1) binding agents which include various celluloses and cross-linked polyvinylpyrrolidone, microcrystalline cellulose, such as Avicel® PH101 and Avicel® PH102, silicified microcrystalline cellulose (ProSolv SMCC™), gum tragacanth and gelatin; (2) filling agents such as various starches, lactose, lactose monohydrate, and lactose anhydrous; (3) disintegrating agents such as alginic acid, Primogel, corn starch, lightly crosslinked polyvinyl pyrrolidone, potato starch, maize starch, and modified starches, croscarmellose sodium, cross-povidone, sodium starch glycolate, and mixtures thereof; (4) lubricants, including agents that act on the flowability of a powder to be compressed, and including magnesium stearate, colloidal silicon dioxide, such as Aerosil® 200, talc, stearic acid, calcium stearate, and silica gel; (5) glidants such as colloidal silicon dioxide; (6) preservatives, such as potassium sorbate, methylparaben, propylparaben, benzoic acid and its salts, other esters of parahydroxybenzoic acid such as butylparaben, alcohols such as ethyl or benzyl alcohol, phenolic compounds such as phenol, or quaternary compounds such as benzalkonium chloride; (7) diluents such as pharmaceutically acceptable inert fillers, such as microcrystalline cellulose, lactose, dibasic calcium phosphate, saccharides, and/or mixtures of any of the foregoing; examples of diluents include microcrystalline cellulose, such as Avicel® PH101 and Avicel® PH102; lactose such as lactose monohydrate, lactose anhydrous, and Pharmatose® DCL21; dibasic calcium phosphate such as Emcompress®; mannitol; starch; sorbitol; sucrose; and glucose; (8) sweetening agents, including any natural or artificial sweetener, such as sucrose, saccharin sucrose, xylitol, sodium saccharin, cyclamate, aspartame, and acesulfame; (9) flavoring agents, such as peppermint, methyl salicylate, orange flavoring, Magnasweet® (trademark of MAFCO), bubble gum flavor, fruit flavors, and the like; and (10) effervescent agents, including effervescent couples such as an organic acid and a carbonate or bicarbonate. Suitable organic acids include, for example, citric, tartaric, malic, fumaric, adipic, succinic, and alginic acids and anhydrides and acid salts.

[0348] Suitable carbonates and bicarbonates include, for example, sodium carbonate, sodium bicarbonate, potassium carbonate, potassium bicarbonate, magnesium carbonate, sodium glycine carbonate, L-lysine carbonate, and arginine carbonate. Alternatively, only the sodium bicarbonate component of the effervescent couple may be present.

[0349] In various embodiments, the formulations described herein are substantially pure. As used herein, “substantially pure” means the active ingredient (e.g., an aptamer, and/or an aptamer construct) is the predominant species present (i.e., on a molar basis it is more abundant than any other individual species in the composition). In some embodiments, a substantially purified fraction is a composition wherein the active ingredient comprises at least about 50 percent (on a molar basis) of all macromolecular species present. Generally, a substantially pure composition will include more than about 80% of all macromolecular species present in the composition. In various embodiments, a substantially pure composition will include at least about 85%, at least about 90%, at least about 95%, or at least about 99% of all macromolecular species present in the composition. In various embodiments, the active ingredient is purified to homogeneity (contaminant species cannot be detected in the composition by conventional detection methods) wherein the composition consists essentially of a single macromolecular species.

### Kits Comprising Aptamers and Aptamer Constructs

[0350] The present disclosure provides kits comprising any of the aptamers, and/or aptamer constructs described herein. Such kits can comprise, for example, (1) at least one aptamer, and/or aptamer constructs; and (2) at least one pharmaceutically acceptable carrier, such as a solvent or solution. Additional kit components can optionally include, for example: (1) any of the pharmaceutically acceptable excipients identified herein, such as stabilizers, buffers, etc., (2) at least one container, vial or similar apparatus for holding and/or mixing the kit components; and (3) delivery apparatus.

### Methods of Treatment

[0351] The present disclosure provides methods of preventing or treating (e.g., alleviating one or more symptoms of) medical conditions through the use of a PDGF aptamer or aptamer construct, a VEGF aptamer or aptamer construct, and/or a VEGF/PDGF aptamer construct. The methods comprise administering a therapeutically effective amount of such aptamers and/or aptamer constructs to a subject in need thereof. The described aptamers can also be used for prophylactic therapy. In some embodiments, the aptamer and/or aptamer construct is administered orally or intravenously.

[0352] The aptamer and/or aptamer construct used in methods of treatment can be: a PDGF aptamer or aptamer construct a VEGF aptamer or aptamer construct, and/or a VEGF/PDGF aptamer construct described herein, or a pharmaceutically acceptable salt thereof, or a prodrug thereof.

[0353] The individual or subject can be any animal (domestic, livestock or wild), including, but not limited to, cats, dogs, horses, pigs and cattle, and preferably humans. As used herein, the terms patient, individual, and subject may be used interchangeably.

[0354] As used herein, “treating” describes the management and care of a patient for the purpose of treating a disease, condition, or disorder and includes the administration of an aptamer, and/or an aptamer construct to prevent the onset of the symptoms or complications of a disease, condition or disorder; to alleviate symptoms or complications of the disease, condition, or disorder; or to eliminate the presence of the disease, condition or disorder in the patient. More specifically, “treating” includes reversing, attenuating, alleviating, minimizing, suppressing or halting at least one deleterious symptom or effect of a disease (disorder) state, disease progression, disease causative agent or other abnormal condition. Treatment is generally continued as long as symptoms and/or pathology ameliorate.

[0355] As used herein, “preventing” means preventing in whole or in part; ameliorating or controlling; reducing, lessening, or decreasing; or retarding or halting.

[0356] In various embodiments, the disclosed compositions and methods are used to treat cardiovascular diseases, cancers, fibrosis, renal diseases or ophthalmic diseases.

[0357] In some embodiments, the disclosed compounds or pharmaceutically acceptable salts thereof, or prodrugs, can be administered in combination with other treatments that improve or eradicate the disease conditions as described above. Compositions including the disclosed aptamers and/or aptamer constructs may contain, for example, more than one aptamer. In some examples, a composition containing one or more aptamers is administered in combination with another useful cardiovascular agent or anticancer agent or antifibrotic agent etc. In general, the currently available dosage forms of the known therapeutic agents for use in such combinations will be suitable.

[0358] “Combination therapy” (or “co-therapy”) includes the administration of an aptamer and/or aptamer construct composition and at least one second agent as part of a specific treatment regimen intended to provide the beneficial effect from the co-action of these therapeutic agents. The beneficial effect of the combination includes, but is not limited to, pharmacokinetic or pharmacodynamic co-action resulting from the combination of therapeutic agents. Administration of these therapeutic agents in combination typically is carried out over a defined time period (usually minutes, hours, days or weeks depending upon the combination selected).

[0359] “Combination therapy” may, but generally is not, intended to encompass the administration of two or more of these therapeutic agents as part of separate monotherapy regimens that incidentally and arbitrarily result in the combinations of the present disclosure. “Combination therapy” is intended to embrace administration of these therapeutic agents in a sequential manner, that is, wherein each therapeutic agent is administered at a different time, as well as administration of these therapeutic agents, or at least two of the therapeutic agents, in a substantially simultaneous manner. Substantially simultaneous administration can be accomplished, for example, by administering to the subject a single dose having a fixed ratio of each therapeutic agent or in multiple, single doses for each of the therapeutic agents.

[0360] The dosage regimen utilizing the aptamers and/or aptamer constructs is selected in accordance with a variety of factors, including, for example, type, species, age, weight, gender and medical condition of the subject; the severity of the condition to be treated; the route of administration; the renal and hepatic function of the subject; and the particular aptamer and/or aptamer constructs or salts thereof employed. An ordinarily skilled physician or veterinarian can readily determine and prescribe the effective amount of the composition required to prevent, counter or arrest the progress of the condition.

[0361] In general, the dosage, i.e., the therapeutically effective amount, ranges from about 1 μg to about 100 mg/kg body weight of the subject being treated, per day.

### EXAMPLES

[0362] The following examples are provided for illustrative purposes only and are not intended to limit the scope of the invention as defined by the appended claims. All examples described herein were carried out using standard techniques, which are well known and routine to those of skill in the art. Routine molecular biology techniques described in the following examples can be carried out as described in standard laboratory manuals, such as Sambrook et al. (2001) Molecular Cloning: A Laboratory Manual, 3rd. ed., Cold Spring Harbor Laboratory Press, Cold Spring Harbor, N.Y.).

### Example 1. PDGF Aptamer Selection and Sequences

[0363] Preparation of Candidate Mixtures:

[0364] A candidate mixture of partially randomized ssDNA oligonucleotides was prepared by polymerase extension of a DNA primer annealed to a biotinylated ssDNA template.

[0365] SELEX Conditions:

[0366] Aptamers to the PDGF-BB protein (R&D Systems) were selected by SomaLogic Inc, as described (Gold et al. (2010) PLoS One 5:e15004), from a library containing a 40-nucleotide random region in which Bn-dU was substituted for dT. The forward primer was 5′-CGCCCTCGTCCCATCTC (SEQ ID NO: 837), and the reverse primer was 5′-CGTTCTCGGTTGGTGTTC (SEQ ID NO: 838). The PDGF-BB protein was biotinylated and partitioned on streptavidin MyOne-SA (Dynal) beads. Preferential selection of aptamers with slow dissociation rates was achieved using a kinetic challenge wherein protein-DNA complexes were incubated in the presence of 10 mM dextran sulfate at 37° C. with increased incubation times and decreased protein concentrations in successive rounds. Kinetic challenge was initiated in round 4 of the selection and was continued through the final 8^{th} round with incubation times as follows: 5 minutes round 4, 15 minutes rounds 5-7, 30 minutes round 8.

[0367] Pool Sequencing:

[0368] Oligonucleotide sequences from the 8^{th} round pool were cloned and several clones were sequenced. This led to the identification of a family of related sequences, as exemplified by the 4149-8_1.

[0369] Deep Sequencing of PDGF SELEX Pool:

[0370] To evaluate more completely the sequences within the 4149-8_1 aptamer family, the 8^{th} round pool was sequenced using 454 pyrosequencing technology. The pool DNA was amplified with 454 primers and the PCR product was purified and normalized using a Sequal normalization plate (Invitrogen, Cat#A10510-01). The eluate was run on a gel to confirm the size and purity of each amplicon. The purified PCR product was sequenced at the 454 pyrosequencing facility at the University of Colorado Health Science Center in Aurora Colo.

[0371] The 454 sequences were aligned with 4149-8_1 by CLUSTAL analysis. The sequence data set from the pool contained 10,803 full length sequences (i.e., those sequences containing both primer sequences) of which 3,839 were unique. These 3,839 unique sequences were searched for the motif “5′-ZACNCGCGZZZAZAGCG” (identity=0.65) (SEQ ID NO: 839) and then “ZZ” (identity=1.0) upstream from this. There were 436 sequences found that contained both of these motifs. In addition, 58 other sequences contained only the first pattern but with a generally low identity and with no evident hairpin structure upstream. The 436 sequences were then aligned as follows, (1) with respect to “ZZ”, (2) with respect to the center of the loop, and (3) with respect to “ZACNCGCGZZZAZAGCG” (SEQ ID NO: 839). For all the sequences, the percentage identity at each position with 4149-8_1 was calculated as listed in FIG. 3A. Tables 1 and 2 lists a number of sequences representative of the 4149-8_1 aptamer family of sequences.

[0372] Aptamer Synthesis:

[0373] The modified deoxyuridine-5-carboxamide amidite reagents used for solid-phase synthesis were prepared by: condensation of 5′-O-(4,4′-dimethoxytrityl)-5-trifluoroethoxycarbonyl-2′-deoxyuridine (Nomura et al. (1997) Nucl. Acids Res. 25:2784) with the appropriate primary amine (RNH₂, 1.2 eq; Et₃N, 3 eq.; acetonitrile; 60° C.; 4 h); 3′-O-phophitidylation with 2-cyanoethyl-N,N-diisopropylchlorophosphoramidite (1.2 eq.; iPr₂EtN, 3 eq.; CH₂Cl₂; −10 to 0° C.; 4 h); and purification by flash chromatography on neutral silica gel (Still, et al. (1978) J. Org. Chem. 43:2923). Aptamers were prepared by solid phase synthesis using the phosphoramidite method (Beaucage and Caruthers (1981) Tetrahedron Lett. 22:1859) with some adjustments to the protocol to account for the unique base modifications described herein. Detritylation was accomplished with 10% dichloroacetic acid in toluene for 45 seconds; coupling was achieved with 0.1 M phosphoramidites in 1:1 acetonitrile:dichloromethane activated by 5-benzylmercaptotetrazole and allowed to react 3 times for 5 minutes; capping and oxidation were performed according to instrument vendor recommendations. Deprotection was effected with 1:1:2, t-butylamine:methanol:water (Mullah 1998). reacted for 24 hours at 37 degrees centigrade. Aptamers were synthesized at 200 nmol scale and purified from a polyacrylamide gel using UV shadowing as described (Fitzwater and Polisky (1996) Methods Enzymol. 267:275) with Costar Spin-X (not including siliconized glass wool or spun polypropylene prefilter) and Amicon YM3 concentration per manufacturer's recommendations.

[0374] Modified Nucleotide Structure Activity Relationship and Affinity Maturation:

[0375] To examine the contribution of each of the eight benzyl side chains to binding, we performed another series of systematic point substitutions by chemically synthesizing 5-position variants with a custom-made library of modified dU phosphoramidites. For this purpose, we designed a library to allow us to probe the microenvironment of each of the positions by varying the size, polarity, disposition of H-bond donors and acceptors, linker length, and orientation of the 5-position substituents. In choosing the functional groups for this analysis, we aimed to include variations on a theme of the original modification (in this case, the benzyl group), amino acid side chains overrepresented in complementarity determining regions (CDRs) of antibodies (like tryptophan and tyrosine) (Mian, I S, et al. (1991) J. Mol. Biol. 217:133; Ramaraj T. et al. (2012) Biochim. Biophys. Acta. 1824:520), and “privileged” fragments of small-molecule drugs (Welsch et al. (2010) Curr. Opin. Chem. Biol. 14:347). In a sense, we endeavored to combine elements of affinity maturation in antibodies and structure-activity relationship (SAR) optimization in medicinal chemistry. Although we utilized a single modified nucleotide during SELEX, post-SELEX optimization is constrained only by the synthetic accessibility of the modified monomers and compatibility with solid-phase synthesis.

[0376] The effect of individual substitutions of the benzyl group with fourteen alternative moieties at the 5-position is summarized in FIGS. 1C and D, and FIG. 6B, with relative affinities expressed as dissociation constant ratios and relative PDGF Rβ phosphorylation expressed as percent phospho-PDGF Rβ ratios. Substitution with dT, which only has a methyl group at the 5-position, represents the most drastic change, and in that sense is comparable to alanine scanning mutagenesis in proteins (Cunningham, B. C. et al. (1989) Science 243:1330). Not surprisingly, this was the least tolerated substitution at six of the eight modified nucleotide positions. The exceptions were nucleotides 1 and 7, where this substitution was well-tolerated. These two positions also tolerated many other substitutions, with some replacements yielding up to 5-fold improvement in binding affinity (FIG. 6B). In contrast, nucleotides 8, 17 and 18 exhibited the highest sensitivity to changes. The best single substitutions were then combined, yielding additional variants including 4149-8_255 and 4149-8_260 (FIG. 6B). Aptamer 4149-8_260, which combined phenethyl-dU (Pe-dU) at nucleotide 17 and thiophene-dU (Th-dU) at nucleotide 18, showed excellent binding to both PDGF-BB and PDGF-AB (FIG. 6B). It is worth noting that the affinity of the originally selected SOMAmer was already so high (K_{d}=20 pM) that it approached the detection limit of the binding assay, so it is possible that the degree of affinity improvement is underestimated. We have applied similar post-SELEX optimization strategies to other SOMAmers with weaker initial binding (e.g., K_{d} values ranging from 100 pM to >10 nM), and have observed affinity improvements of up to 100-fold.

[0377] Homodimers of PDGF Aptamer 4149-8_260 (SL5):

[0378] Since PDGF forms a covalently linked homodimer, and two SOMAmers bind to each PDGF homodimer, we determined the effect on binding of homodimerized SOMAmers. The affinity of the PDGF aptamer homodimers could be substantially improved compared to the affinity of the corresponding monomers, due to avidity effects. The crystal structure showed that the 5′ ends of the SOMAmer were 38 Å apart, while the 3′ ends were 74 Å apart. Connecting the 5′ to 3′ end would require at least 63 Å since the shortest path between the two points bisected the protein. Two types of homodimers were ordered, based on readily available chemistry. These were 1) head-to-tail homodimers connected by two to six Heg linkers, which provide ˜20 Å distance per Heg, and 2) 3′-3′ homodimers connected via a synthetic doubler support, combined with one to three Hegs. The homodimers of 4149-8_260 were tested in the PDGF-BB Zorbax binding assay. The binding assay was performed with limiting amount of SOMAmer, and would not distinguish binding of one SOMAmer per protein dimer versus binding of two SOMAmers per protein dimer. The structure of the homodimers is shown in Table 1 (sequences 4149-8_334 through 4149-8_342). The K_{d} values obtained in the Zorbax assay suggested that in the 5′ to 3′ configuration, a longer linker was desirable, and gave up to 10-fold improvement in binding affinity, as shown in Table 1a. In the 3′-3′ linked homodimers, the shorter linker actually appeared to perform better than the longer linker. This was corroborated by cellular phosphorylation results, see Table 1a.

[0379] Based on these sequences, an exemplary consensus sequence is:

(SEQ ID NO: 502)

5′-ZZVCLₙGV′ZACNMGCGZZZAZAGCG-3′,

wherein
V is selected from an A, C or G;
V′ is selected from a C, G or Z, wherein V′ is complementary to V;
N is independently selected from any naturally occurring or modified nucleotide;
M is selected from a C or A;
Z is independently selected from a modified pyrimidine; L is a spacer selected from any naturally occurring or modified nucleotide, a hydrocarbon linker, a polyethylene glycol linker or a combination thereof; and
n is 0 to 20;
wherein one or more nucleotide insertions are optionally included.

[0380] Sequence Truncation Studies:

[0381] Systematic truncation from the 5′ and 3′ ends of 4149-8_1 was performed to define a minimum length required to retain full binding activity of the aptamer to human PDGF-BB, as shown in Table 3. K_{d} values for a subset of the truncations are shown. Z=Benzyl-deoxyuridine (Bn-dU); A, C, G and T are deoxyribonucleotides.

### Protein Expression and Purification, and Aptamer Complex Formation

[0382] For crystallography studies, recombinant human PDGF-BB protein was purchased from Creative BioMart (Shirley, N.Y.). The recombinant protein was expressed in E. coli cells. Aptamer solutions were thawed and then annealed by heating to ˜95° C. for 5 minutes, then incubating at 40° C. for 5 minutes, then cooling to room temperature. The annealed aptamer solution was mixed with protein at a 1.1:1 ratio of DNA to protein. The complex was diluted 5-fold in buffer containing 20 mM Na/K phosphate (pH 7) and 100 mM NaCl. The resulting mixture was concentrated to ˜4 mg/mL in protein in a 1.5 mL Amicon centrifugal filter. Final concentration was estimated from the final volume of retentate.

### Example 2. Crystallization and Structure of PDGF-Aptamer Complex

[0383] Crystals were grown using the sitting drop vapor diffusion method in Compact, Jr. plates (Emerald BioSystems, WA) set up at 16° C. Crystals for data collection were obtained from a primary screen (ProPlex, Molecular Dimensions). The crystal for the PDGF-BB:4149-8_255 complex was grown from 100 mM magnesium acetate, 100 mM sodium acetate (pH 4.5) and 8% (w/v) PEG 8000. The crystal for the PDGF-BB:4149-8_260 complex was grown from 100 mM magnesium acetate, 100 mM sodium cacodylate (pH 6.5) and 15% (w/v) PEG 6000. Crystals were harvested with Litho Loops and cryoprotected by quick transfer to reservoir solution containing 33% (v/v) ethylene glycol before flash-cooling by plunging directly into liquid nitrogen.

[0384] Data Collection and Structure Determination:

[0385] Data for both structures were collected at beamline 19-ID of the Advanced Photon Source (Argonne, Ill.). The data sets were processed using XDS (Kabsch 2010). The structure of the PDGF-BB:4149-8_260 complex was initially phased by molecular replacement using Phaser from the CCP4 software suite (CCP4, 1994) with the protein model of PDGF from the structure of the PDGF-BB:Beta-type PDGF receptor complex (PDB entry 3MJG) as the search model. Molecular replacement located a single protein monomer per asymmetric unit. Inspection of the electron density maps following an initial round of restrained refinement in REFMAC showed features consistent with nucleic acid adjacent to the protein model. The model of the aptamer was subsequently built through a process of “bootstrapping”, i.e., partial models were subjected to iterative rounds of refinement; resulting in marginally improved maps which allowed further model building. First, phosphate ions were built in nucleic acid backbone density. Secondly, phosphates were replaced by dT residues. Following refinement, modified residues could be discerned by protrusions of positive difference electron density. Identification of the modified residues facilitated determination of the sequence register of the aptamer, and in the final steps dT residues were replaced with the correct nucleobases. All manual building was performed using the Crystallographic Object-Oriented Toolkit (Coot) (Emsley & Cowtan, 2004). The structure of the PDGF-BB:4149-8_255 structure was solved by molecular replacement using the finished model of the 4149-8_260 complex.

[0386] In each structure, a protuberance of electron density was observed contiguous with the electron density of the Oγ atom of residues Thr88 and Thr90. Although O-mannosylation has been reported at these sites for recombinant PDGF-B expressed in yeast (Settineri, et al., (1990)) there is little reason to expect similar post-translational modifications in the PDGF-B expressed in E. coli. As the observed electron density suggested less than full occupancy, the threonine residues were modeled without any post-translational modification.

[0387] Table 4 discloses data-collection statistics and refinement and model statistics of two aptamer ligands with 4149-8_260 (SEQ ID. NO. 211) and 4149-8_255 (SEQ ID. NO. 207) respectively.

[0388] Table 5 illustrates base-pair parameters for the PDGF BB aptamer compared to B-form DNA. The PDGF BB aptamer adopts deviated B-form conformations in the 5′ stem loop domain and in both stems of the miniknot. Where appropriate, mean values and standard deviations (in parenthesis) are given. Aptamer values are based on analysis using web3DNA (Zheng et al. (2009) Nucleic. Acids Res. 37:W240) and B-DNA values (as found in high resolution crystal structures) were determined using 3DNA as described and reported in Olson, et al. (2001) J. Mol. Biol. 313(1): 229.

[0389] The monomeric subunits of PDGF-BB form twisted β-sheets that dimerize in an anti-parallel orientation characteristic of the cystine knot family of proteins (Oefner et al. (1992) EMBO J. 11:3921). SL5 (4149-8_260) binds two homologous sites at either end of the long axis, crossing the homodimer interface and contacting each of the three PDGF loops (FIG. 7A). The SOMAmer is composed of two domains connected by a network of hydrophobic aromatic interactions (FIG. 7B). At the 5′ end, a short stem is capped with a Heg loop (disordered in the crystal structure), while the remainder of the molecule folds into an extraordinarily small H-type pseudoknot (Aalberts, D. P. et al. (2005) Nucleic Acids Res. 33:2210), with modified nucleotides clustering at the stem loop/pseudoknot junction. Remarkably, all eight modified nucleotides are in contact with PDGF. Seven modified nucleotides cluster together along a hydrophobic groove on the protein, while Bn-dU1 adopts an extended conformation, following a channel at the PDGF homodimer interface. Two natural nucleotides also contact PDGF, with the remaining natural nucleotides contributing to internal structure (FIG. 2 and FIG. 7). The secondary structure elements of SL5, a stem-loop and a pseudoknot, are well-known nucleic acid structural motifs. However, replacement of certain conventional bases with modified nucleotides offers novel functional groups for alternative interactions. This distinguishing feature of SL5 results in an extensive hydrophobic surface for protein binding as well as unique intramolecular contacts between canonical and modified nucleotides.

[0390] Although the 3′ end of SL5 exhibits hallmark characteristics of an H-type pseudoknot (Staple, D. W. et al. (2005) PLoS Biol. 3:e213), this categorization understates the unconventional nature of this signature “miniknot” motif. Compared to the smallest structurally reported H-type pseudoknot which requires 21 nucleotides (Nonin-Lecomte S. et al. (2006) Nucleic Acids Res. 34:1847), the SL5 miniknot consists of a mere 16 nucleotides (FIG. 7B). Furthermore, deletion of the terminal mG24:dC12 base pair of stem 2 (S2) results in undiminished binding affinity (FIG. 3), demonstrating the functional integrity of a 14-nucleotide miniknot. With unprecedented backbone twists and stacking interactions, the miniknot represents a novel pseudoknot variant in which unusually small size is attained via stabilization contributed by packing of the hydrophobic moieties of the modified nucleotides.

[0391] Miniknot stem 1 (S1) formally consists of just two Watson-Crick base pairs (FIG. 8A), while loop 2 (L2) is composed nominally of 5 bases, Pe-dU17, Th-dU18, dA19, Bn-dU20 and mA21. While interactions between L2 and S1 are a defining feature of pseudoknots, they are typically limited to H-bonding. In contrast, the SOMAmer miniknot makes atypical loop-to-stem stacking interactions, supported by unconventional base pairing. In particular, S1 is stabilized by stacking with a non-canonical Bn-dU17:Bn-dU20 base pair derived from L2 (FIG. 8C and FIG. 8B), effectively creating a three base-pair S1 with a novel backbone discontinuity. In contrast to previously described U:U imino carbonyl base pairs, the Pe-dU17:Bn-dU20 base pair utilizes a single H-bond between N3 of Bn-dU17 and the carbonyl oxygen in the amide linker of Bn-dU20 (FIG. 8D). The syn conformation about the glycosyl bond of Bn-dU20 impedes H-bonding with Bn-dU17, but allows Bn20 to stack with Bn-dU8 base without steric clashing with the sugar of Bn-dU8. The unconventional Pe-dU17:Bn-dU20 base pair is made possible by a 280° turn in the backbone between nucleotides 18 and 20 (FIG. 8C). This dramatic strand reversal allows Bn-dU20 base to stack with the sugar of dA9 and form a hydrogen bond with Pe-dU17. Importantly, the Pe-dU17:Bn-dU20 base pair derives additional stabilization through hydrophobic interactions conferred by the modified nucleotides; the ethylene (linker) portion of the Pe-dU17 side chain is directed toward Bn16 (CH::π) while its benzyl group is stacked in π-π edge-to-face interactions with Bn2 and Th18 (FIG. 8E). One additional interaction between L2 and S1 is a base triple (mA21:dG15:dC10; FIG. 8F), a recurrent motif in pseudoknots (Chen, G. et al. (2009) Proc. Natl. Acad. Sci. USA 106:12706). This is the only long-range tertiary interaction in SL5 that does not involve the modified nucleotides.

[0392] Loop 1 (L1) consists of a single extruded nucleotide, mA11 that allows the backbone to make a tight 94° turn, with the intrastrand phosphate distance between mA11 and dC12 compressing to just 5.9 Å (FIG. 8G). H-type pseudoknots often have one or two nucleotides in L1, which typically form hydrogen bonds with S2 and stack into the helical junction (Nonin-Lecomte, S. et al. (2006) Nucleic Acids Res. 34:1847; Michiels, P. J. et al. (2001) J. Mol. Biol. 310:1109). The extruded L1 nucleotide is necessary to keep the structure condensed so that the 5′ stem domain can interface with the miniknot through the hydrophobic moieties of the modified nucleotides. As expected, the extruded base is not conserved (FIG. 3) and can be replaced with a single C3 spacer (FIG. 6A), however, its deletion abrogates binding, presumably due to interference with the miniknot formation.

[0393] The Watson-Crick base pairs of miniknot S1 (dA9:Bn-dU16, dC10:dG15) assemble by the favored H-type pseudoknot arrangement in which strand one of S2 leads directly into strand two of S1, providing efficient stacking of the stems (Klein, D. J. et al. (2009) Nat. Struct. Mol. Biol. 16:343). The three base pairs of S2 are composed entirely of Watson-Crick interactions and form a slightly undertwisted B-form helix (FIG. 8H). This understwisting results in helical parameters that more closely resemble A-form helices, as expected for pseudoknot topology; however, the relevance of these calculations is equivocal, given the short length of the helices in this structure. S2 does not form a conventional coaxial stack with S1 due to severe helical overwinding at the junction (twist angle of 70°) formed by dC10:dG15 of S1 and dC14:dG22 of S2. Continuous stacking of the stems is nevertheless maintained as dC14 stacks with dG15, and dG22 stacks with mA21 from the base triple (FIG. 8H). The extensive helical twist at this junction is necessary to allow mA21 to bridge the major groove of S2 while broadening the minor groove for base triple formation. This configuration is typical in pseudoknots with one or two nucleotides in L1 (Nonin-Lecomte, S. et al. (2006) Nucleic Acids Res. 34:1847; Michiels, P. J. et al. (2001) J. Mol. Biol. 310:1109).

[0394] The SL5 5′ stem is composed of two Watson-Crick base pairs (mA3:Bn-dU7 and dC4:dG6) and a non-canonical Bn-dU2:Bn-dU8 base pair at the base of the stem (FIG. 8I). The Bn-dU2:Bn-dU8 base pair contains two hydrogen bonds, a typical 4-carbonyl-N3 and a unique 4-carbonyl from Bn-dU2 base to amide linker of Bn-dU8 bond (FIG. 8J). Analysis of related sequences in the affinity-enriched pool shows that the length and base composition of the 5′ stem can change, with the notable exception of the invariant Bn-dU:Bn-dU brace at the base of the stem (FIGS. 3A and B), highlighting the importance of this non-canonical base pair in the overall structure and function of SL5. Stability of the 5′ stem helix is further bolstered by stacking of dU8, Bn20 and Pro82 of PDGF (FIG. 9H). The 5′ stem-loop and miniknot domains of SL5 converge where the backbone makes a sharp 111 bend. Significant twist angles and radial displacement of the base pairs in the 5′ stem results in bases 2-4 and 6-7 having greater stacking overlap (because of helix undertwisting) than in conventional B-form helices, while Bn-dU8 base is shifted out and Bn-dU7 base stacks with the amide linker of Bn-dU8 (FIG. 8I). This atypical helix facilitates critical interactions with the rest of SL5 and with PDGF; Bn-dU8 base stacks with Bn20 while Bn8 lies perpendicularly between the rings of Bn16 and Bn20 in consecutive π-π edge-to-face interactions. These long-range tertiary interaction define a precise hinge between the miniknot and the stem-loop domains (FIGS. 8L and 8K). The lack of curvature between the first two nucleotides prevents clashing of Bn-dU1 base with Bn2, augmenting stacking of the rings (FIG. 8I). Bn2 sits in the middle of a hydrophobic cluster created by Bn7 and Bn8 (from the 5′ stem) and Bn16, Pe17 and Bn20 (from the miniknot) (FIG. 7B, FIG. 8I and FIG. 8K). This hydrophobic cluster contributes to stabilization of the SOMAmer, supported by the observation that SL5 exhibits a Tₘ of 64° C., which is >30° C. higher than its analog that lacks the modified nucleotides.

[0395] In addition to SL5, we also solved the structure of SL4 (4149-8_255), which is identical to SL5 except for the replacement of Bn-dU8 with isobutyl-dU (iB-dU). When iB-dU8 was combined with Pe-dU17 and Th-dU18 in variant SL4, the SOMAmer showed substantially weaker binding (˜20-50-fold vs. SL5) and a 75-fold lower in vitro inhibitory activity (FIG. 1A, FIG. 1B and FIG. 6B). The smaller non-aromatic isobutyl side chain cannot form the energetically favorable π-π edge-to-face stacking seen with the benzyl side chains of Bn-dU20, Bn-dU8 and Bn-dU16 in SL5 (FIG. 8M and FIG. 8N). This creates a hole in the center of the hydrophobic cluster at the protein interface, effectively unlocking the hinge between the 5′ stem and the miniknot domains. The structural effect of this substitution is directly analogous to a Phe to Leu mutation in the hydrophobic core of a protein. Such protein mutations are well-described (Kadonosono, T. et al. (2003) Biochemistry 42:10651; Lin, H. J. et al. (2003) Biochim. Biophys. Acta. 1649:16; Baase, W. A. et al. (2010) Protein Sci. 19:631) and usually have a significant destabilizing effect. Junctions between secondary structure motifs are known to play a critical role in determining nucleic acid tertiary structure (Pyle, A. M. et al. (2011) Curr. Opin. Struct. Biol. 21:293).

[0396] Despite markedly weaker target-binding affinity, SL4 exhibits similar thermal melting profile to SL5 in the absence of ligand (Tₘ values of 62° C. and 64° C., respectively). This is consistent with the notion that the cavity and altered junction topology created by iB-dU8 substitution in SL4 destabilizes the protein-binding interface, while leaving the intradomain structures of the SOMAmer intact. The conformations of free SOMAmers in solution may well be very different from those in the complex with the protein, which could also diminish the relationship between Tₘ and binding affinity. In fact, since the energetic cost of solvating a large hydrophobic surface of the SOMAmer is likely to be substantial, we expect the uncomplexed SOMAmer to collapse around the hydrophobic side chains and adopt a conformation in which the hydrophobic side chains are partially protected from the solvent.

[0397] In contrast to previously described protein:aptamer complexes, hydrophobic interactions dominate the interface between SL5 and PDGF (FIG. 2, FIG. 4 and FIG. 9). Binding to PDGF-BB creates a buried surface area of ˜1225 Å² per SOMAmer. The eight modified nucleotides of SL5 create an extensive hydrophobic interface that interacts with 13 non-polar amino acids of PDGF (Ala35, Phe37, Leu38, Val39, Trp40, Pro42, Cys52, Cys53, Ile75, Ile77, Pro82, Ile83, and Phe84), which account for approximately half of the total non-polar contacts, with the remainder comprising aliphatic regions of polar or charged amino acids such as Glu24, Arg27, Asn36, Asn54, Asn55, Arg56, Arg73, Lys74, Lys80, Lys85, and Lys86 (FIG. 9). Similar interactions between completely non-polar residues and non-polar moieties of charged amino acids are often observed in proteins. Thus, the structural diversity afforded by the modified nucleotides in SOMAmers enables them to mimic the rich repertoire of interactions accessible to proteins. The striking difference in the extent of hydrophobic contacts made by the SOMAmer compared to traditional aptamers is evident when the interface atoms are displayed on the surfaces of the target proteins. SL5 exhibits remarkably few polar interactions, having just six H-bonds and one charge-charge interaction with PDGF (FIG. 4), despite close proximity to basic amino acids. Relative to the contact surface area, this is significantly lower than what is typical for aptamers. The total number of H-bonds and charge-charge interactions (that is, polar contacts) for six traditional aptamers increases approximately linearly in direct proportion to the interface area (FIG. 10A, FIG. 22A) with a correlation coefficient of 0.91 and an average of 1.9±0.4 polar contacts per 100 Å² interface area. SL5, as well as two additional SOMAmers in other co-crystal structures, clearly fall outside of the 99% confidence intervals of this trend, with less than half the number of polar contacts per interface area (average of 0.7±0.2 per 100 Å² interface area), while exhibiting a trend toward higher binding affinities for their targets (FIG. 22C). In terms of ligand efficiency (free energy of binding per non-hydrogen contact atom) (Kuntz, I. D. et al. (1999) Proc. Natl. Acad. Sci. USA 96:9997), aptamers and SOMAmers do not appear to be different (FIG. 22C), encompassing a range of values observed with protein-based and small molecule-based ligands (Wells, J. A. et al. (2007) Nature 450:1001). Free energies of binding per interface area are also similar (FIG. 22C). What is different, however, is the value of free energy of binding per polar contact, which is about twice as large for SOMAmers than for aptamers (FIGS. 22 B and C), consistent with the notion that SOMAmers derive a larger contribution to binding from hydrophobic interactions.

[0398] Charge-charge interactions often contribute less than 0.2 kcal/mol to the stability of a folded protein (Sali, D. et al. (1991) J. Mol. Biol. 220:779. In contrast, burying just a single methylene group is estimated to contribute ˜1-1.5 kcal/mol to globular protein stability and/or binding interactions (Kellis, J. T., Jr. et al. (1988) Nature 333:784; Pace, C. N. et al. (2011) Mol. Biol. 408:514). SOMAmer structures reveal a strong reliance on hydrophobic interactions and in this sense, their binding to proteins more closely resemble typical protein-protein interactions. Consistent with this observation, the affinity of SL5 for PDGF shows virtually no decrease across a broad range of salt concentrations (0.1 to 1.0 M NaCl) or pH values (5.0 to 8.8), in contrast to the effects seen with traditional aptamers (Ahmad, K. M. et al. (2011) PLoS ONE 6:e27051; Tang, Q. et al. (2007) J. Colloid. Interface. Sci. 315:99).

[0399] Post-SELEX optimization facilitates fine tuning of shape complementary and hydrophobic packing interactions. For example, the exceptional shape complementary of Pe-dU17 and Th-dU18 at the protein interface (FIG. 10B) is corroborated with the structure-activity relationships (FIG. 6B). Bn-dU1 also forms a unique interaction with PDGF-BB, with the benzyl ring sitting in a tunnel formed by the Cys43-Cys52 disulfide bond and a salt bridge between Glu24 of PDGF chain1 and Arg56 of chain 2 (FIG. 10C). The crystal structure suggests that the binding pocket can accommodate a variety of side chains, including larger bicyclic substituents, thereby enhancing this point of contact with the protein. Indeed, we have identified several modified nucleotide substitutions at this position that confer 5- to 10-fold enhancement in binding affinity (FIG. 6B).

[0400] A notable feature of the PDGF-BB:SL5 structure is the degree to which the SOMAmer mimics PDGFRβ. The receptor binds to PDGF primarily through hydrophobic interactions, including seven hydrophobic amino acids at the PDGF interface (Shim, A. H. et al. (2010) Proc. Natl. Acad. Sci. USA 107:11307). SL5 binding site largely overlaps that of the receptor with the Bn-dU aromatic rings occupying the same hydrophobic groove on the protein (FIG. 11). PDGF contacts both the receptor and SL5 with 24 residues, of which 10 are shared. These shared or “promiscuous” residues likely represent a hot spot of binding energy on the surface of PDGF (Wells, J. A. et al. (2007) Nature 450:1001; Clackson, T. et al. (1994) Science 267:383. However, compared with PDGF Rβ, SL5 exhibits a 10-fold higher affinity for PDGF-BB (Lokker, N. A. et al. (1997) J. Biol. Chem. 272: 33037). Consistent with these observations, SL5 is a potent inhibitor of PDGF-BB (FIG. 1B and FIG. 6B).

### Example 3. Binding Affinity Assays

[0401] For determination of target binding affinity, SOMAmers were 5′ end-labeled using T4 polynucleotide kinase (New England Biolabs) and γ-³²P-ATP (Perkin Elmer). Binding assays were performed by incubating radiolabeled SOMAmer (˜20,000 c.p.m) at a concentration of ˜0.03-0.05 nM and target protein at concentrations ranging from 10⁻⁷ to 10⁻¹² M in 1×SB18T buffer (40 mM HEPES, pH 7.5; 120 mM NaCl; 5 mM KCl; 5 mM MgCl₂ and 0.01% TWEEN-20) at 37° C. for 30 minutes. Bound complexes were mixed with Zorbax resin and captured on Durapore filter plates. The fraction of SOMAmer bound was quantified with a PhosphorImager (FUJI FLA-3000). Raw binding data were corrected for nonspecific background binding of radiolabeled SOMAmer to Zorbax resin. Equilibrium dissociation constants (K_{d}) was determined as previously described (Jellinek et al. (1993) Proc. Natl. Acad. Sci. 91:11227). Competitor tRNA at a concentration of 200 nM was included in isoform specificity studies as indicated in FIG. 5. To determine the salt dependence on the PDGF-BB/SOMAmer and E10030 interactions, binding affinity assays were performed and analyzed as described above in the presence of 40 mM Hepes pH 7.5, 0.01% TWEEN-20 and either 100 mM, 250 mM, 500 mM, 750 mM or 1.0 M NaCl). The log-log plots of the salt concentrations versus the dissociation constants were fit using simple linear regression. The slope of the plots represents the number of counter-ions released from the DNA upon protein binding, as described by the counter-ion condensation theory of (Manning, G. S. (1969) J. Chem. Phys. 51:924). The affinity of aptamer 4149-8_260 (SEQ ID NO. 211) for PDGF showed little change across a broad range of salt concentrations (0.1 to 1.0 M NaCl) or pH values (5.0 to 8.8), in contrast to the effects seen with traditional aptamers (Ahmad, K. M. et al. (2011) PLoS One 6:e27051; Tang, Q. et al. (2007) J. Colloid. Interface Sci. 315: 99).

### Example 4. PDGF-BB Cellular Phosphorylation Assay

[0402] PDGF-BB Activity.

[0403] For testing the ability of PDGF-BB SOMAmers to inhibit PDGF Rβ activation, Hs27 human foreskin fibroblast cells (American Type Culture Collection) were seeded at 5000 cells/well into a 96-well plate, and serum-starved for 24 hours. SOMAmers (varying concentrations as indicated in the figures) were incubated with PDGF-BB (20 ng/mL) (Creative BioMart) in serum-free media for 30 minutes at 37° C., then the complex was added to serum-starved Hs27 cells. At five minutes post stimulation, the supernatant was discarded and the cells were lysed in Lysis Buffer #9 (R&D Systems: 1% NP-40 Alternative, 20 mM Tris (pH 8.0), 137 mM NaCl, 10% glycerol, 2 mM EDTA, 1 mM activated sodium orthovanadate, 10 μg/mL Aprotinin, and 10 μg/mL Leupeptin) on ice for 5 minutes. Elisa detection of phospho-PDGF Rβ was performed using the DuoSet Phospho-PDGF Rβ kit (R&D Systems) according to the manufacturer's instructions. The percent phospho-PDGF Rβ was measured at OD₄₅₀, corrected for plate absorbance and background signal with a no stimulant control. Experiments were generally performed in duplicate or triplicate. Data were plotted in GraphPad Prism 3.0 and fit to a one site competition curve using nonlinear regression. Representative plot of the IC₅₀ determination is shown in FIG. 13 for SOMAmers 4149-8_379 and 5′ amino-linker modified SOMAmer 4149-8_379, with IC₅₀ values of 1.6 nM and 1.7 nM, respectively.

[0404] For activity screening of variants of clone 4149-8, percent inhibition of PDGF-BB-induced PDGF Rβ phosphorylation in Hs27 fibroblasts, under the same conditions as described above but at a single concentration of SOMAmer variants (generally 20 nM), was evaluated.

### Example 5. Additional PDGF Ligands Based on Nap-dU Modification

[0405] To identify additional aptamers that bind to PDGF-BB with high affinity, we have performed another SELEX experiment with a library comprising Nap-dU modified nucleotides. The selections were performed in a manner substantially analogous to the one described in Example 1 above and resulted in the identification of the Nap-dU aptamer clone 5169-4.

[0406] Deep Sequencing of PDGF Nap-dU SELEX Pool:

[0407] To evaluate more completely the sequences within the 5169-4_1 aptamer family, the 7^{th} round pool was sequenced using 454 pyrosequencing technology. The pool DNA was amplified with 454 primers and the PCR product was purified and normalized using a Sequal normalization plate (Invitrogen, Cat# A10510-01). The eluate was run on a gel to confirm the size and purity of each amplicon. The purified PCR product was sequenced at the 454 pyrosequencing facility at the University of Colorado Health Sciences Center in Aurora, Colo.

[0408] The sequence data set from the pool contained 8,273 full length sequences (i.e., those sequences containing both primer sequences) of which 1,629 were unique. These 1,629 unique sequences were used to find statistically significant n-mer patterns by counting all possible n-mers in the sequence set, from 4-mers to 30-mers. By comparing the counts for each identified n-mer to counts expected at random for n-mers from a pool of the same composition, statistically significant patterns were found. Two major patterns were identified in the sequence set and 5169-4_1 was found aligned within the second pattern defined by the conserved sequence motif “APGPAPGCACAPCP” found in 11 sequences. A search through all unique sequences for this motif (identity=0.75) found 51 sequences that were then aligned by the motif. For all the sequences, the fractional identity at each position in the alignment was calculated as listed in FIG. 14, with the consensus sequence indicated.

[0409] Sequence Truncation Studies:

[0410] Systematic truncation from the 5′ and 3′ ends of the 50-nucleotide 5169-4 clone was performed to define a minimum length required to retain full binding activity of the aptamer to human PDGF-BB, as shown in Table 6. K_{d} values for these truncations are shown (P=Napthyl-deoxyuridine (Nap-dU); A, C, G and T are deoxyribonucleotides). The 5169-4 clone proved highly amenable to truncation and a 21-nucleotide sequence was identified (5169-4_26) that bound to PDGF-BB with improved binding affinity compared to the 50-mer (17 pM and 29 pM, respectively). The 5169-4_26 21-mer contained 5 Nap-dU modified nucleotides versus 9 Nap-dU modified nucleotides in the 50-mer.

[0411] C3 Spacer Single Substitutions in 5169-4_26 (21-Mer):

[0412] The first round of post-SELEX modifications of the Nap-dU PDGF-BB aptamer included a C3 spacer walk at all positions in the 21-mer 5169-4_26. The C3 spacer walk is meant to identify bases not required for high affinity binding that could potentially be removed altogether, replaced with the C3 spacer or other linkers such as hexaethylene glycol (Heg) or polyethylene glycol (PEG) linkers. The results for the C3 spacer substitutions are shown in Table 7. In this table, “P” denotes Nap-dU, “C3” denotes C3 spacer; A, C and G denote deoxyribonucleotides, and “NB” denotes no binding up to 100 nM PDGF-BB. Three sites tolerated C3 substitution with a modest decrease in binding affinity: C1, G6 and C7 (numbering refers to the 21-mer, as shown below). One position, C15, tolerated a C3 spacer substitution with no effect on the binding affinity, compared to 5169-4_26.

[0413] 2′-O-Methyl Single Substitutions in 5169-4_26 (21-Mer):

[0414] 2′O-methyl substitutions were made at all natural bases in order to identify positions that could tolerate this nuclease-resistant substitution. With the 2′O-methyl Nap phosphoramidite synthesized in our laboratories (Nap-mU), we also evaluated the Nap-dU positions that would tolerate Nap-mU single substitutions. In addition, deoxythymidine (T) was substituted for Nap-dU to assess the importance of each Nap-dU. The binding affinity results are shown in Table 8, and demonstrate that all positions tolerated 2′O-methyl substitutions to varying degrees. The effect of 2′O-methyl substitutions at each deoxycytidine position (C) resulted in no change in the binding affinity, compared to 5169-4_26, up to a 2-fold decrease in binding affinity. The four deoxyguanosine positions (G) showed varying results when substituted with 2′O-methyl from 2.5-fold increased binding affinity at G14, to 5.5-fold decreased binding affinity at G10, compared to 5169-4_26. The 2′O-methyl substitutions at the six deoxyadenosine positions (A) had from zero to greater than 50-fold adverse effect on the binding affinity. The deoxyadenosines towards the 5′ end of the aptamer (A3, A5 and A8) were the three most sensitive to 2′O-methyl substitution. Only the Nap-dU at position 21 completely tolerated Nap-mU substitution with no effect on the binding affinity while the Nap-mU substitution at position 11 showed a 2.5-fold decrease in binding affinity, compared to 5169-4_26. The remaining Nap-mU substitutions resulted in a 15- to 30-fold decrease in binding affinity. The only substitutions that completed eliminated binding (at PDGF-BB concentrations up to 100 nM) were the deoxythymidine substitutions at positions 12 and 21, with the remaining deoxythymidine substitutions having a significant negative affect (>400 fold) on the binding affinity. In Table 8, P=5-naphthalene modified dU, a superscript 1 indicates a 2′-O-methyl modified nucleoside. A, C, G, and T represent the naturally occurring deoxyribonucleotides and “NB” denotes no binding up to 100 nM PDGF-BB.

[0415] Multiple 2′-O-Methyl Substitutions in 5169-4_26 (21-Mer).

[0416] The combined effects of 2′-O-methyl substitutions in 5169-4_26 lead to the identification of several variants with improved binding affinity, including variant 5169-4_146. This 21-mer has 11 positions that are nuclease-protected by 2′O-methyl and its binding affinity is at least 20-fold greater than the parent truncate, 5169-4_26 (0.60 pM vs 17 pM, respectively). Many other variants also had significant improvements (approximately 3-fold) in binding affinity with combinations of 3 to 10 2′O-methyls. In Table 9, P=5-naphthalene modified dU, a superscript 1 indicates a 2′-O-methyl modified nucleoside, A, C and G represent the naturally occurring deoxyribonucleotides and “NB” denotes no binding up to 3.2 nM PDGF-BB.

### Example 6. PDGF Nap-dU Aptamer Activity Assay

[0417] To analyze the inhibitory impact of PDGF Nap-dU aptamers on PDGF Rβ activation cellular phosphorylation inhibition assays were performed as described in Example 4. The four aptamer sequences tested inhibited PDGF Rβ activation with IC₅₀ values as follows: 5169-4_26, IC₅₀=1.6 nM; 5169-4_84, IC₅₀=3.3 nM; 5169-4_85, IC₅₀=7.3 nM; 5169-4_112, IC₅₀=1.0 nM.

### Example 7. VEGF Aptamer Selection and Sequences

[0418] Preparation of Candidate Mixtures:

[0419] A candidate mixture of partially randomized ssDNA oligonucleotides was prepared by polymerase extension of a DNA primer annealed to a biotinylated ssDNA template.

[0420] VEGF SELEX Conditions:

[0421] Aptamers to recombinant human VEGF-121 protein (both from R&D Systems) were selected by SomaLogic Inc, as described (Gold et al. (2010) PloS One 5:e15004), from a library containing a 40-nucleotide random region in which Nap-dU was substituted for dT. For VEGF-121, the forward primer was 5′-GCCACACCCTGCCCTC-3′ (SEQ ID NO. 844) and the reverse primer was 5′-GAGGACACAGACAGACAC-3′ (SEQ ID NO. 845). VEGF-121 protein was biotinylated and partitioned on streptavidin MyOne-SA (Dynal) beads. Preferential selection of aptamers with slow dissociation rates was achieved using a kinetic challenge wherein protein-DNA complexes were incubated in the presence of 10 mM dextran sulfate at 37° C. with increased incubation times and decreased protein concentrations in successive rounds. In the VEGF-121 SELEX, rounds 4 and 5 included a 15 minute kinetic challenge while rounds 6 and 7 (final round) included a 30 minute kinetic challenge.

[0422] The smallest alternatively spliced form of vascular endothelial growth factor, VEGF-121, is a difficult protein target for SELEX. With naturally occurring DNA or RNA libraries, or with nucleic acid libraries modified at the 2′-position of ribose, we have previously failed to obtain even a modest degree of affinity improvement. This is notable for two reasons. First, among members of the cystine knot superfamily, VEGF-121 has the highest structural similarity to PDGF-BB, with a root-mean-square deviation of 1.9 Å for 124 Ca atoms (Muller et al., 1997). Second, the larger and the most prevalent VEGF isoform, VEGF-165, has proved to be a good target for SELEX. For example, pegaptanib (Macugen), the only aptamer-based therapeutic to have received regulatory approval to date (for the treatment of macular degeneration), binds only to VEGF-165 through the heparin-binding exon-7-encoded domain, which is lacking in VEGF-121 (Lee et al., 2005; Ruckman et al., 1998). One difference between VEGF-121, VEGF-165 and PDGF-BB is the overall charge, with pI values of 5.8, 8.5 and 10.1, respectively. This points to the importance of polar interactions in aptamer binding. Successful affinity enrichment for VEGF-121 was ultimately achieved with a SELEX Nap-dU library.

[0423] Identification of VEGF-121 Nap-dU Aptamer Sequences:

[0424] Two highly related high affinity variants that differ at a single position (4867-15 and 4867-31) were identified from a Nap-dU SELEX experiment performed as described above. Clone 4867-31 has been truncated to a 29-mer in a series of deletion experiments (Table 7). It is worth noting that truncation of both high affinity clones (4867-15 and 4867-31) results in the same 29-mer since the single nucleotide difference is outside the 5′ boundary of the minimal sequence. Truncated variants that encompass the shorter sequence with high affinity biding, 29-mer 4867-31_143 (5′-CCGPP CAAGP GCPPG PAGGA PPPAA APGG-3′; where “P” is the single-letter designation for Nap-dU) and its close variants, bind to human VEGF-121, human VEGF-165, mouse VEGF-120 and rat VEGF-164 with comparable affinities, ranging from 0.1-1 nM (Table 10). In this table, “P” denotes Nap-dU; A, C, and G denote the naturally occurring deoxyribonucleotides and “NB” denotes no binding up to 100 nM VEGF.

[0425] C3 Spacer Single Substitutions in 4867-15_2 (50-Mer).

[0426] The first round of post-SELEX modifications of the VEGF-121 aptamer was a C3 spacer walk at all positions in the 50mer 4867-15_2 (truncated 50-mer). The C3 spacer walk is meant to identify bases not required for high affinity binding that could potentially be removed altogether, replaced with the C3 spacer or other linkers such as hexaethylene glycol (Heg) or polyethylene glycol (PEG) linkers. The results for the C3 spacer substitutions are shown in Table 11. In this table, “P” denotes Nap-dU, “V” denotes C3 spacer; A, C, and G denote the naturally occurring deoxyribonucleotides and “NB” denotes no binding up to 100 nM VEGF. At least three internal sites tolerated C3 substitution: C17, G26 and G29 (numbering refers to the 50-mer, as shown below).

[0427] 2′-O-Methyl Single Substitutions in 4867-31_43 (32-Mer).

[0428] 2′O-methyl substitutions were made at natural bases in order to identify positions that could tolerate this nuclease-resistant substitution. In addition, 2′-OMe-uridine (2′-OMeU) was substituted for Nap-dU to assess the importance of each Nap-dU. In addition, C3 spacers were tested at certain internal positions hypothesized to be extruded bases, now in the context of the 32mer. Internal deletions and alternative bases were tested at each of the three positions as well. The binding affinity and cell culture inhibition data for select SOMAmers (single concentration of 20 nM) are shown below. The results are shown in Table 12, and demonstrate that C8 (C17 in Table 11) did not completely tolerate substitution to C3 in the context of the shorter truncate. The other two putative extruded bases (G17 and G20) retain good binding and functional activity as C3 or alternative base substitutions in this context. Internal deletions at those positions were not tolerated. None of the Nap-dU modifications could be replaced with 2′OMe-U in this experiment. Several internal sites tolerated 2′OMe modifications, however. In Table 12, P=5-naphthalene modified dU, and a superscript 1 indicates a 2′-OMe modified nucleoside, V=3 carbon spacer, and an empty box indicates a nucleoside deletion. A, C, G, and U represent the naturally occurring deoxyribonucleotides.

[0429] 2′-O-Methyl Nap-dU Substitutions and Multiple 2′-O-Methyl Substitutions in 4867-31_143 (29-Mer).

[0430] With the 2′O-methyl Nap phosphoramidite synthesized in our laboratories (Nap-mU), we evaluated the Nap-dU positions that would tolerate Nap-mU single substitutions. In addition, we tested combinations of 2′OMe and C3 linker substitutions at each of the natural bases. The binding affinity and cell culture inhibition data for select SOMAmers (single concentration of 20 nM) are shown below. As shown in Table 13 below, most of the Nap-dU residues did not tolerate OMe substitution, but substitution of Nap-mU for Nap-dU at position 22 gave a 10-fold increase in affinity, and excellent inhibitory activity. In this table, superscript “1” denotes 2′-O-methyl substitution, “V” denotes C3 spacer. The 2′-OMe combinations were mostly well-tolerated based on affinity, but certain combinations showed a striking loss of inhibitory activity.

[0431] The combined effects of 2′-O-methyl and C3 substitutions led to the identification of several variants with improved binding affinity, including variant 4867-31_188. This 29-mer has 10 positions that are nuclease-protected by either 2′OMe or C3 and its binding affinity is about 3-fold tighter than the parent truncate, 4867-31_143 (38 pM vs 140 pM, respectively). Variant 4867-31_188 retains comparable cellular inhibition activity relative to the parent SOMAmer. See Table 13.

[0432] The only position that tolerated Nap-mU was nucleotide 22 (using 4867-31_143 truncate as the parent sequence). This Nap-mU substitution was next placed into the background of the best combined 2′OMe SOMAmer, 4867-31_188. In addition, the substitution of the original dG at position 15 with a C3 spacer was compared with 2′-OMe substitution at that position to examine the possibility that nuclease-protected base might add rigidity to the molecule and hence increase binding. The best aggregate result was obtained with variant 4867-31_192, which now has 9 protected positions compared to the parent 29-mer truncated variant 4867-31_143 (see Table 14 below; superscript “1” denotes 2′-O-methyl substitution and “V” denotes C3 spacer).

[0433] Modified Nucleotide Structure Activity Relationship and Affinity Maturation:

[0434] To examine the contribution of each of the ten napthyl side chains to binding, we performed another series of systematic point substitutions by chemically synthesizing 5-position variants with a custom-made library of modified dU phosphoramidites. For this purpose, we designed a library to allow us to probe the microenvironment of each of the positions by varying the size, polarity, disposition of H-bond donors and acceptors, linker length, and orientation of the 5-position substituents. In choosing the functional groups for this analysis, we aimed to include variations on a theme of the original modification (in this case, the napthyl group), amino acid side chains overrepresented in complementarity determining regions (CDRs) of antibodies (like tryptophan and tyrosine) (Mian, I. S. et al. (1991) J. Mol. Biol. 217:133; Ramaraj, T. et al. (2012) Biochim. Biophys. Acta. 1824:520), and “privileged” fragments of small-molecule drugs (17). FIG. 15 shows the results of these substitutions, represented as the ratio of K_{d} values (substituted/unsubstituted). Of the 17 different modification substitutions tested each of the ten Nap-dU positions, only four substitutions (Trp-dU 27, NE-dU 16, MBn-dU 10 and BT-dU 16) had little to no effect of the binding affinity. All other substitutions resulted in weaker binding affinity, to varying degrees.

[0435] Deep Sequencing of VEGF SELEX Pool:

[0436] To evaluate more completely the sequences within the 4149-8_1 aptamer family, the enriched pool was sequenced using 454 pyrosequencing technology. The pool DNA was amplified with 454 primers and the PCR product was purified and normalized using a Sequal normalization plate (Invitrogen, Cat#A10510-01). The eluate was run on a gel to confirm the size and purity of each amplicon. The purified PCR product was sequenced at the 454 pyrosequencing facility at the University of Colorado Health Sciences Center in Aurora, Colo.

[0437] The 454 sequences were aligned with 4867-31 by CLUSTAL analysis. The sequence data set from the pool contained 13,139 full-length sequences (i.e., those sequences containing both primer sequences) of which 2,235 were unique. These 2,235 unique sequences were searched for the motif 5′-CCGPP CAAGP GCPPG PAGGA PPPAA APGG-3′. There were 86 sequences found that contained this motifs. For all the sequences, the percentage identity at each position with 4867-31 was calculated as listed in FIG. 16.

### Example 8. VEGF Binding Affinity Assays

[0438] For determination of target binding affinity, SOMAmers were 5′ end-labeled using T4 polynucleotide kinase (New England Biolabs) and γ-³²P-ATP (Perkin Elmer). Binding assays were performed by incubating radiolabeled SOMAmer (˜20,000 c.p.m) at a concentration of ˜0.03-0.05 nM and target protein at concentrations ranging from 10⁻⁷ to 10⁻¹² M in 1×SB18T buffer (40 mM HEPES, pH 7.5; 120 mM NaCl; 5 mM KCl; 5 mM MgCl₂ and 0.01% TWEEN-20) at 37° C. for 30 minutes. Bound complexes were mixed with Zorbax resin and captured on Durapore filter plates. The fraction of SOMAmer bound was quantified with a PhosphorImager (FUJI FLA-3000). Raw binding data were corrected for nonspecific background binding of radiolabeled SOMAmer to Zorbax resin. Equilibrium dissociation constants (K_{d}) was determined as previously described (Jellinek et al. (1993) Proc. Natl. Acad. Sci. 90:11227).

### Example 9. VEGF Activity Assay

[0439] To analyze the inhibitory impact of VEGF121 SOMAmers on the cellular kinase activity of VEGF-R2 (Vascular Endothelial Growth factor Receptor 2), we used human umbilical vein endothelial cells (HUVECs) (Lonza, #CC-2519) which expresses endogenously high level of VEGF-R2. HUVEC cells were plated in EGM-2 (Endothelial Cell Growth Medium) supplemented with EGM-2 BulletKit (#CC-3162) containing 2% FBS, growth factors (hEGF, Hydrocortisone, VEGF, HFGF-B, Rβ-IGF-1), heparin, ascorbic acid and GA-1000 (Gentamicin, Amphotericin-B). When HUVEC cells reached 70 to 80% confluence, they were plated in 24-well plate (10⁵ cells/well) and starved overnight with serum-free medium.

[0440] SOMAmers (a single concentration at 20 nM or a range of concentrations) were added to the cultures with 20 ng/mL (1 nM) of VEGF-121 (R&D System, #4464-VS) containing 1% BSA at 37° C. for 30 minutes. The cells were washed in PBS two times and stimulated with the pre-incubated VEGF-121/SOMAmers complex for 5 minutes. The treated cells were washed again with PBS two times and added ice-cold lysis buffer (1% NP-40 Alternative, 20 mM Tris (pH8.0), 137 mM NaCl, 10% glycerol, 2 mM EDTA, 1 mM activated sodium orthovanadate, 10 μg/mL Aprotinin and 10 μg/mL leupeptin supplemented with a Halt phosphatase inhibitor (Thermo Scientific, #78428). The cell lysates were measured for phosphorylation of VEGF-R2 by using Human Phospho-VEGF R2/KDR Kit (R&D, DYC 1766-2).

[0441] In functional activity experiments in vitro, various truncated variants of clone 4867-31 at a screening concentration of 20 nM are capable of essentially completely inhibiting VEGFR2 phosphorylation induced by VEGF-121 or VEGF-165 (1-4 nM) in immortalized or primary human umbilical vein endothelial cells (HUVECs). A representative plot of the IC₅₀ determination is shown in FIG. 17 for VEGF aptamers 4867-31_43 and 4867-31_192, with IC₅₀ values of 2.2 nM and 2.1 nM, respectively.

[0442] For activity screening of variants of clone 4867-31, we have evaluated percent inhibition of VEGF-induced VEGF R2 phosphorylation in HUVECs, under the same conditions as described above but at a single concentration of SOMAmer variants (generally 20 nM).

### Example 10. Homodimer Constructs of PDGF and VEGF Aptamers

[0443] Both PDGF-BB and VEGF are disulfide linked homodimers that exert their biological effects by dimerizing their tyrosine kinase receptors leading to receptor autophosphorylation and signal transduction. If more than one aptamer can bind to its protein target, as is the case with PDGF-BB aptamer 4149-8_260 (based on the crystal structures), such aptamers can be covalently linked in a multimeric construct in a manner that permits simultaneous binding of individual aptamer subunits to the protein. This can lead to improvement in affinity through avidity effect. Two types of homodimers were synthesized, based on readily available chemistry. These were 1) head-to-tail homodimers connected by zero to six Heg linkers, which provide ˜20 Å distance per Heg, and 2) 3′-3′ homodimers connected via a synthetic doubler support, combined with one to three Hegs on each side (that is, two, four or six Hegs total in the dimer). The homodimers of 4149-8_379, 5169-4_26 and 4867-31_192 were tested in a competition binding assay. For determination of competitor binding affinities, aptamer ligands were 5′ end-labeled using T4 polynucleotide kinase (New England Biolabs) and γ-³²P-ATP (Perkin Elmer). Competition assays were performed by pre-mixing a fixed concentration of radiolabeled ligand (1.0 nM) with varying concentrations of competitor aptamer (10⁻¹¹ to 10⁻⁶ M). The ligand and competitor dilutions were incubated with the target protein (100 pM) in 1×SB18T buffer (40 mM HEPES, pH 7.5; 120 mM NaCl; 5 mM KCl; 5 mM MgCl₂ and 0.01% TWEEN-20) at 37° C. for 60 minutes. Bound complexes were mixed with Zorbax resin and captured on Durapore filter plates. The fraction of ligand bound was quantified with a PhosphorImager (FUJI FLA-3000). Raw binding data were normalized to binding without addition of competitor. Data were plotted in GraphPad Prism 3.0 and fit to a one site competition curve using nonlinear regression to determine the equilibrium dissociation constants for the competitor aptamers (Kᵢ). PDGF Homodimers: The structure of the PDGF homodimers of sequences 4149-8_379 (sequences 4149-8_438 through 4149-8_447) and 5169-4_26 (sequences 5169-4_134 through 5169-4_143) are shown in Table 15. For the 4149-8_379 based homodimers, the Kᵢ values obtained in the competition assay suggested that in the 5′ to 3′ configuration, a longer linker was desirable, since a greater than 10-fold improvement in binding affinity was measured with five Heg linkers compared to no Heg linker (0.25 pM vs 4.2 pM, respectively). In the 3′ to 3′ linked 4149-8_379 homodimers, the longer four and six Heg linkers also performed at least 10-fold better than no linker and approximately 2-fold better than the two Heg linkers. For the 5169-4_26 based homodimers, the Kᵢ values indicated a longer Heg linker was advantageous in the 5′ to 3′ configuration, since the Kᵢ improved from 28 pM for no Heg linker to 3.6 pM for six Heg linkers. There was no difference in the Kᵢ values for five and six Heg linkers in the 5′ to 3′ configuration. In the 3′ to 3′ linked 5169-4_26 based homodimers the same pattern was observed, with the Kᵢ improving as the Heg linker length increased. The six Heg linker showed a 5-fold improvement in the _{Ki} compared to no Heg linker (2.0 pM vs. 11 pM, respectively). In Tables 15 and 16, Z=Benzyl-deoxyuridine (Bn-dU), P=5-naphthalene modified dU (Nap-dU), M=methylenedioxybenzyl-dU (MBn-dU), a superscript 1 indicates a 2′-O-methyl modified nucleoside, no superscript indicates deoxyribonucleotides, “C3” indicates a three carbon linker and “H” indicates a hexaethylene glycol linker.

### Example 11. PDGF/VEGF Heterodimer Aptamer Constructs

[0444] Heterodimers Based on PDGF Aptamer 4149-8 and VEGF Aptamer 4867-31.

[0445] With the aim of developing constructs with specificity for PDGF and VEGF, we designed and tested a variety of aptamer constructs comprising a VEGF aptamer linked to a PDGF aptamer. The first aptamer constructs tested combined PDGF variant 4149-8_273 and VEGF 4867-31_183. Aptamer constructs were synthesized head-to-tail, connected by zero to three hexaethylene glycol (Heg) linkers, in both orientations (either with the PDGF aptamer at the 5′ end or VEGF aptamer at the 5′ end). The results are shown in Table 17 and 18 below. In Table 17, “Z” denotes Bn-dU, “P” denotes Nap-dU, superscript “1” denotes 2′-O-methyl substitution, no superscript indicates deoxyribonucleotides, “V” denotes C3 spacer and “H” denotes hexaethylene glycol (Heg) linker. In Table 18, percent activity remaining denotes fractional PDGF βR phosphorylation levels in Hs27 fibroblasts in the presence of 20 nM aptamer relative to control (no aptamer).

[0446] Based on binding affinity for PDGF-BB, -AB, VEGF-121, and VEGF-165, aptamer construct 4149-8_320 appeared to give the best results in this experiment. We also tested the aptamer constructs in the PDGF cellular phosphorylation assay, as shown in Table 18. Based on the functional assay data, all aptamer constructs tested inhibited PDGF-BB-induced PDGF BR phosphorylation in Hs27 fibroblasts. Aptamer constructs 4149-8_313, 4149-8_314, 4149-8_315, 4149-8_316, 4149-8_319 and 4149-8_320 inhibited PDGF-BB-induced PDGF βR phosphorylation with IC₅₀ values of <20 nM. Aptamer constructs 4149-8_317 and 4149-8_318 had IC₅₀ values of ˜20 nM.

[0447] We synthesized 4149-8_401, based on the configuration of 4149-8_320 (5′PDGF-3Heg-VEGF3′), comprising PDGF aptamer 4149-8_379 and VEGF aptamer 4867-31_192. See Table 19. In this table, “Z” denotes Bn-dU, “P” denotes Nap-dU, M denotes MBn-dU, superscript “1” denotes 2′-O-methyl substitution, no superscript denotes deoxyribonucleotides, “C3” denotes C3 spacer and “H” denotes hexaethylene glycol (Heg) linker. Aptamer construct 4149-8_401 showed binding affinity for PDGF-BB and VEGF121 that was equivalent or better than the binding affinity of its precursor aptamer construct, 4149-8_320. See Table 20.

[0448] Aptamer constructs 4149-8_320 and 4149-8_401 inhibited PDGF-BB-induced were PDGF-Rβ phosphorylation in Hs27 fibroblasts with IC₅₀ values of about 1 nM and 5 nM, respectively. Further, aptamer construct 4149-8_401 comprising a 5′ amino linker conjugated to either 20 kDa or 40 kDa PEG maintained the ability to inhibit PDGF-BB-induced PDGF-Rβphosphorylation in Hs27 fibroblasts with IC₅₀ values of about 1 nM. Those results are consistent with stoichiometric titration/inhibition of all of the PDGF in the assay (1 nM monomer).

[0449] We tested another set of aptamer constructs comprising aptamers 4149-8_379 and 4867-31_192 to determine the effect of overall linker length and the orientation of the PDGF and VEGF aptamers. See Table 21, below. With VEGF at the 5′ end, we tested one to six Heg linkers. With PDGF at the 5′ end, we tested two to six Heg linkers, including 4149-8_401, which has three Heg linkers. One Heg linker variant was not tested in this orientation because it exhibited somewhat reduced binding in a related variant 4149-8_318. Binding data are shown in Table 16. Most of the aptamer constructs performed well, with the exception of 4149-8_408 and 4149-8_409, which showed somewhat weaker affinity for PDGF-BB. The binding affinity of the Ophthotech aptamer E10030 (Fovista) is included for comparison.

[0450] The ability of the aptamer construct 4149-8_401 to inhibit the activity of both PDGF and VEGF in vitro was tested in the receptor phosphorylation experiments as described above. Aptamer construct 4149-8_401 inhibited PDGF-induced PDGFRβ phosphorylation in Hs27 fibroblasts with comparable potency to that of the PDGF monomer 4149-8_379 (IC₅₀ values of 2.4 nM and 1.7 nM, respectively). Similarly, aptamer construct 4149-8_401 inhibited VEGF-induced VEGFR2 phosphorylation in HUVEC cells with comparable potency to that of the VEGF monomer 4867-31_192 (IC₅₀ values of 0.7 nM and 2.1 nM, respectively). FIG. 18 shows the results of that experiment. FIG. 18A shows (A) inhibition of PDGF-induced PDGF Rβ phosphorylation in Hs27 fibroblasts with PDGF aptamer 4149-8_379 (open circles) and PDGF/VEGF aptamer construct 4149-8_401 (closed circles), and (B) inhibition of VEGF-induced VEGF R2 phosphorylation in HUVECs with VEGF aptamer 4867-31_192 (open circles) and PDGF/VEGF aptamer construct 4149-8_401 (closed circles).

[0451] Heterodimers Based on PDGF Aptamer 5169-4 and VEGF Aptamer 4867-31.

[0452] We have designed and tested additional heterodimer constructs based on the variants of PDGF aptamer 5169-4_26 and VEGF aptamer 4867-31_192. Aptamer constructs were synthesized head-to-tail, connected by one to six hexaethylene glycol (Heg) linkers, in both orientations (either with the PDGF aptamer at the 5′ end or VEGF aptamer at the 5′ end). The results are shown in Table 22. With VEGF at the 5′ end Heg linkers between three and six resulted in the highest affinities. The affinities in general were slightly lower when the VEGF-121 aptamer sequence was on the 3′ end, with most K_{d} values falling in the 100-300 pM range, except for the five Heg linker sequence which had a K_{d} of 56 pM. With PDGF at the 5′ end, the K_{d} values ranged from 11 pM for three Heg linkers to 0.54 pM for four Heg linkers, with the remaining K_{d} values falling in between for all other Heg linker lengths. When PDGF was at the 3′ end there was a trend towards higher binding affinity as the linker length increased, with one Heg linker having a K_{d} of 5.3 pM and six Heg linkers having a K_{d} of 0.20 pM. In Table 22, “P” denotes Nap-dU, superscript “1” denotes 2′-O-methyl substitution, no superscript denotes deoxyribonucleotides and “H” denotes hexaethylene glycol (Heg) linker.

### Example 12. Simultaneous Binding of PDGF/VEGF Aptamer Constructs to VEGF and PDGF

[0453] To demonstrate the ability of the PDGFNEGF aptamer constructs to bind VEGF and PDGF simultaneously, a sandwich assay was developed. Briefly, Nunc Maxisorp® plates were coated with either human PDGF-BB or human VEGF-121 (20 ng/mL). After blocking the wells with a 1% BSA solution, PDGFNEGF aptamer construct was added (10 nM) and allowed to bind to the adsorbed protein target. After washing, the biotinylated complementary protein (2 nM PDGF-BB for VEGF-121 coated plates and 2 nM VEGF-121 or VEGF-165 for PDGF-BB coated plates) was allowed to bind to form a ternary complex. Following another wash, horseradish peroxidase conjugated streptavidin (HRP-SA) was added and allowed to form a quaternary complex. After a final wash, a color forming horse radish peroxidase substrate was added according to the manufacturer's directions (Thermo Scientific TMB substrate kit 34021) and the reaction stopped when appropriate by addition of 1.6 M H₂SO₄. The absorbance per well at 450 nm was determined with the Spectramax M5 plate reader with auto check on. In parallel to the method described above, a set of four control experiments were executed in which one of the 4 components that make up the quaternary complex was excluded.

[0454] As shown in FIG. 19, PDGFNEGF aptamer construct SL1012 (20 kDa PEG-N-4149-8_401) was able to bind simultaneously to human VEGF-121 and PDGF-BB. A strong signal was observed when all components of the quaternary complex were added (complete) while the absence of any one of the 4 components resulted in background or near background signal. Similar results were obtained with PDGF and VEGF coated plates, indicating that the order of protein addition to the aptamer construct did not matter. As shown in FIG. 19, SL1012 was able to bind simultaneously to human VEGF-165 and PDGF-BB. FIG. 19A shows microtiter plates coated with VEGF with addition of biotinylated PDGF. FIG. 19B shows microtiter plates coated with PDGF with addition of biotinylated VEGF. Data are presented as the mean+95% confidence interval (n=3). A strong signal was observed when all components of the quaternary complex were added (complete) while the exclusion of any of the four components resulted in background or near background signal. The data also demonstrate that the addition of a PEG moiety to the 5′-terminus of the aptamer construct does not preclude simultaneous binding activity.

[0455] Simultaneous binding of human VEGF-165 and human PDGF-BB to (A) SL1012 or and (B) SL1013 (40 kDA PEG-N-4149-8-401) is shown in FIG. 20. Microtiter plates were coated with PDGF with addition of biotinylated VEGF. Complete means addition of all components of the quaternary complex, while each condition without one of the four components is shown in the graphs. Data are presented as the mean+95% confidence interval (n=3)

[0456] A similar experiment was performed with various aptamer constructs that did not contain the PEG moiety. In this experiment, only a no aptamer control was included because the previous results demonstrated the requirement for the other components of the complex to generate signal. As shown in FIG. 21, aptamer constructs 4149-8_317, 4149-8_318, 4149-8_320, 4149-8_401 and 4149-8_414 simultaneously bound to PDGF and VEGF regardless of the order of protein addition. FIG. 21(A) shows microtiter plates coated with VEGF with addition of biotinylated PDGF and FIG. 21(B) shows microtiter plates coated with PDGF with addition of biotinylated PDGF.

Add data on simultaneous binding of heterodimer constructs based on the variants of PDGF aptamer 5169-4 and VEGF aptamer 4867-31.

### Example 13. Intravitreal Pharmacokinetic Studies

[0457] Initial ocular pharmacokinetic testing was performed to understand how the aptamers and aptamer constructs behave in the eye. Four aptamers and aptamer constructs were tested as shown in Table 23.

[0458] For each aptamer or aptamer construct, a single intravitreal injection was performed into both eyes of five New Zealand White rabbits (10 eyes). Animals received either a 0.5 mg/eye dose (SL1010 and SL1011) or a 1.0 mg/eye dose (SL1012 and SL1013). These doses represent the weight of the aptamer or aptamer construct only (PEG weight was excluded from the calculations). All test articles were formulated in phosphate buffered saline. For each aptamer or aptamer construct test article, vitreous humor samples were collected from both eyes from one animal at 2, 24, 48, 96 or 192 hours post dose. Vitreous humor samples were stored frozen until they were assayed.

[0459] The vitreous humor concentrations of the aptamers or aptamer constructs were determined by ultra performance liquid chromatography (UPLC) assay methods with detection by absorbance at 260 nanometers (nm). Briefly, the vitreous hydrogel was sheered by passing it several times through a 20 gauge needle. Vitreous proteins were precipitated by the addition of 2 volumes of 2-ethoxyethanol. Following centrifugation, the supernatant was recovered and injected onto an Acquity® C18 column (0.2×100 mm). The column temperature was 80° C. and the flow rate was maintained at 0.2 mL/min. Buffer A consisted of TEAA pH 7.0 and 5% acetonitrile. Buffer B consisted of 100% acetonitrile. The program held 50% buffer B for 1 minute following the injection of sample and then buffer B was increased linearly to 70% over 4 minutes. Detection was accomplished by absorbance at 260 nm. Concentrations (free acid equivalent) of aptamer or aptamer construct in the vitreous humor were determined by interpolation of the peak absorbance units of the unknown samples to those obtained by a standard curve prepared with known concentrations of aptamer or aptamer construct.

[0460] The results of that experiment are shown in Table 24.

[0461] An ordinary linear regression fit of the natural logarithm of the vitreous concentration versus time resulted in estimates for the vitreous half-lives of 105, 47, 69 and 92 hours for SL1010, SL1011, SL1012, and SL1013, respectively. Table 25 shows the results, along with the 95% confidence interval.

[0462] These vitreous half-lives compare favorably to the half-lives in NZW rabbits of similar sized therapeutic VEGF inhibitors, such as Macugen (83 hours, Eyetech Study Group (2002) Retina 22:143) and Lucentis (70 hours, Gaudreault et al. (2007) Retina 27:1260). Therefore, these aptamers and aptamer constructs may be useful for the treatment of ocular diseases such as AMD and diabetic retinopathy.

### Example 14. Materials and Methods

[0463] This Example provides a summary of the general methods and materials used in the proceeding examples.

[0464] Determination of Nuclease Sensitive Sites by Liquid Chromatography Coupled to Mass Spectrometry (LCMS):

[0465] For digestion by DNase I, polyacrylamide-gel-purified aptamer (500 nM final concentration) was incubated with recombinant human DNase I (Cell Sciences, Cat No. CSI10719) (0.3 units for 4149-8_379 and 3 units for 5169-4_146) in nuclease buffer (510 mM Tris HCl pH 7.6, 2.5 mM MgCl₂, 0.5 mM CaCl₂) at 37° C. in a total reaction volume of 150 μL. Aliquots (50 μL) were collected at 0, 30 and 60 minutes and the reaction terminated by incubating at 95° C. for 5 minutes. For digestion with DNase II 500 nM of gel purified aptamer was incubated with porcine DNase II (Worthington Biochemical Corporation) (18 units for 4867-31_192, 1 unit for 4149-8_379) in nuclease buffer (100 mM sodium acetate pH 4.6, 2 mM MgCl₂, 15 mM NaCl) at 37° C. in a total reaction volume of 150 μL. Aliquots were collected and the reactions stopped as described above. The 5′-amine containing versions of 4867-31_192 and 4149-8_379 and the 5′-OH version of 5169-4_146 were utilized for these experiments.

[0466] Following nuclease digestion, the full-length and aptamer fragments were separated by liquid chromatography and detected by ultraviolet absorbance and mass spectrometry (LCMS). Briefly, samples were analyzed on an LCMS system consisting of an Agilent 1100 HPLC equipped with a vacuum degasser (Model # G1322A), an autosampler (Model #G1313A), a binary pump module (Model # G1312A), a column manager with temperature control (Model #G1316A) and a variable wavelength detector (Model # G1314A)) coupled to a Bruker Esquire 3000 ion trap mass spectrometer. LCMS runs were performed with Agilent Chemstation® software (version B.01.03). The chromatography was performed using a Hamilton PRP-3, 2.1×150 mm column at 80° C. Mobile phase A contained 10 mM piperidine and 10 mM imidazole, pH approximately 10 (not adjusted); mobile phase B contained 10 mM piperidine and 10 mM imidazole in 75/25 acetonitrile/water. The flow rate was 0.25 mL/min and the gradient elution was 0-1 minutes: 0% B; 1-20 minutes:0-53% B. Samples (20 μL) were injected and absorbance determined at 254 nm. Typical source conditions for mass spectrometric detection were as follows: negative ion electrospray ionization mode, nebulizer pressure at 50 psi, drying gas at 7 L/min, source temperature was set at 325° C., and the capillary voltage was set at 3000 V. Trap conditions were scan range 200 to 2200 m/z, accumulation time 50 msec, trap drive 92, averaging 25 spectra.

[0467] Data were processed using Daltonics DataAnalysis® 2.0. Mass spectra were obtained by summing across the observed peak in the TIC, and smoothing using a Svitsky-Golay algorithm (smoothing width=0.8 m/z, cycles=2). Spectra were deconvoluted using the algorithm within the Daltonics software. Parameters included mass range between 2000-30000 Da, abundance cutoff of 10%, minimum peaks in component of 3, and molecular weight agreement of 0.05%.

[0468] DNase I Aptamer Stability Assay:

[0469] Polyacrylamide-gel-purified aptamers at a final concentration of 250 nM were incubated with 2 or 10 units/mL of recombinant human DNase I (Cell Sciences, Cat No. CSI10719) in nuclease buffer (10 mM Tris HCl pH 7.6, 2.5 mM MgCl₂, 0.5 mM CaCl₂) at 37° C. in a total reaction volume of 100 μL. At various times, a 20 μL aliquot was collected and the reaction stopped by adding an equal volume of 2× gel loading buffer (93.85% formamide, 0.03% SDS, 20 mM Na₂EDTA, 0.01% xylene cylanol and 0.01% Orange G) and heating at 95° C. for 2 minutes. Samples were loaded onto a 15% TBE polyacrylamide denaturing gel (8 M urea) and electrophoresis performed at 200 V for 20 minutes. Gels were stained with approximately 2 μM SYBR® Gold (Molecular Probes, Cat No. S11494) for 10 minutes to visualize the bands. The amount of full-length aptamer remaining at each time point was quantified using FlourChem®Q analysis software (Alpha Innotech). If necessary, the intensity of each band was determined following a background subtraction and data are presented as a percentage remaining of full-length input DNA at the zero time point. Aptamers with a hydroxyl at the 5′-terminus were utilized for these experiments except for aptamer 4149-8_379 which harbored a 5′-terminal amine.

[0470] DNase II Aptamer Stability Assay:

[0471] Polyacrylamide-gel-purified aptamers at a final concentration of 250 nM were incubated with 120 units/mL or 240 units/mL of porcine DNase II (Worthington Biochemical Corporation) in nuclease buffer (0.1M NaOAc pH 4.6, 2.0 mM MgCl₂, 15 mM NaCl₂) at 37° C. in a total reaction volume of 100 μL. At various times, a 20 μL aliquot was collected and the reaction stopped by adding an equal volume of 2× gel loading buffer (93.85% formamide, 0.03% SDS, 20 mM Na₂EDTA, 0.01% xylene cylanol and 0.01% Orange G) and heating at 95° C. for 2 minutes. Samples were loaded onto a 15% TBE polyacrylamide denaturing gel (8 M urea) and electrophoresis performed at 200 V for 20 minutes. Gels were stained with approximately 2 μM SYBR® Gold (Molecular Probes, Cat No. S11494) for 10 minutes to visualize the bands. The amount of full-length SOMAmer remaining at each time point was quantified using FlourChem® Q analysis software (Alpha Innotech). If necessary, the intensity of each band was determined following a background subtraction and data are presented as a percentage remaining of full-length input DNA at the zero time point. Aptamers with a hydroxyl at the 5′-terminus were utilized for these experiments except for aptamer 4149-8_379 which harbored a 5′-terminal amine.

[0472] SOMAmer Stability Assay in Rabbit Vitreous Humor:

[0473] Polyacrylamide-gel-purified aptamers at a final concentration of 500 nM were incubated in 90% pooled vitreous humor from New Zealand White rabbits (Bioreclamation IIC, Cat No. RAB-VITHUM. Samples were incubated at 37° C. in a total reaction volume of 200 μL (samples also contained a final concentration of 0.067% phosphate buffered saline). At various time points, a 20 μL aliquot was collected and the reaction stopped by adding an equal volume of 2× gel loading buffer (93.85% formamide, 0.03% SDS, 20 mM Na₂EDTA, 0.01% xylene cylanol and 0.01% Orange G). Samples were stored at −20° C. until processed. To each sample 100 μL of water was added followed by 150 μL of 25:24:1 Phenol/Chloroform/Isoamyl alcohol (AMRESCO). Samples were mixed and centrifuged at 16,100×g for 15 minutes. The aqueous phase was collected and frozen at −20° C. until gel analysis. Samples (15 μL) were loaded onto a 15% TBE polyacrylamide denaturing gel (8 M urea) and electrophoresis performed for approximately 20 minutes at 200 V. Gels were stained with approximately 2 μM SYBR® Gold (Molecular Probes, Cat No. S11494) for 10 minutes to visualize the bands. The amount of full-length SOMAmer remaining at each time point was quantified using FlourChem® Q analysis software (Alpha Innotech). If necessary, the intensity of each band was determined following a background subtraction and data presented as a percentage remaining of full-length input DNA at the zero time point.

[0474] Competition Binding Assay Methods:

[0475] Aptamers to be used as ligands in the competition binding assay were 5′-end-labeled using T4 polynucleotide kinase (New England Biolabs) and γ-[³²P]ATP (Perkin Elmer). The competition assay was performed by combining equal volumes of 2 nM ligand with unlabeled competitor (concentrations ranging from 10⁻⁶ to 10⁻¹¹ M) in 1×SB18T buffer [40 mM Hepes (pH 7.5), 120 mM NaCl, 5 mM KCl, 5 mM MgCl₂, and 0.01% TWEEN-20]. Human PDGF-BB (Creative Biomart) at a concentration of 200 pM in 1×SB18T buffer was added to the ligand/competitor mixtures and the reactions were incubated at 37° C. for 40 minutes. Bound complexes were mixed with Zorbax® resin (Agilent Technologies) and captured on Durapore® filter plates. The signal in each well was quantified with a Phosphorlmager (FUJI FLA-3000). Raw binding data were corrected for background signal and normalized to fraction bound for no competitor. To determine the inhibitor constants (Kᵢ), the data were plotted in GraphPad Prism® 6 and fit to a one-site competition curve.

### Example 15. VEGF Aptamers with Improved Nuclease Stability

[0476] This Example provides the chemical modifications applied to VEGF aptamers that improve the nuclease stability of the aptamers. In this Example, the following abbreviations are used in context with the aptamer: P is NapdU and 2′-OMe is a 2′-O-methyl nucleotide. To enhance the nuclease resistance of the NapdU-containing Slow Off Rate Modified Aptamers (SOMAmers) selected to bind to human vascular endothelial growth factor (VEGF), 2′-O-methyl (2′-OMe) groups were added at nucleotide positions in which binding to VEGF protein was not significantly affected. These efforts led to the discovery of aptamer 4867-31_192 which contains nine 2′-OMe groups within the 29 nucleotide sequence. The use of Nap-dU nucleotides, the 2′-OMe substitutions and the addition of an inverted deoxythymidine at the 3′-terminus in 4867-31_192 together impart a substantial degree of nuclease protection compared with unmodified DNA Nevertheless, 4867-31_192 is still not fully stable in the presence of some nucleases. For example, while stable against human recombinant DNase I (FIG. 23A), 4867-31_192 is digested by porcine DNase II (FIG. 23B). As shown in FIG. 23B, a decrease in the amount of full-length aptamer over time indicates sensitivity to digestion by DNase II.

[0477] To determine the feasibility of further stabilizing the aptamer by using phosphorothioate linkages, a systematic substitution of phosphorothioates in place of individual phosphodiester bonds (the “phosphorothioate walk” experiment) was performed in order to determine which positions of aptamer 4867-31_192 could accept a phosphorothioate linkage without significantly impacting binding to VEGF121. For all sequences in this example and the proceeding examples, a nucleotide having a superscript “1” indicates that the nucleotide has a 2′-O-methyl modification, and a nucleotide having a superscript “2” indicates that the nucleotide has a 3′-phosphorothioate group and links that nucleotide to the nucleotide immediately 3′ to it). A nucleotide having both superscript “1” and “2” indicates that the nucleotide has both a 2′-O-methyl modification and a 3′-phosphorothioate group and links that nucleotide to the nucleotide immediately 3′ to it. All aptamers were tested for binding with the inclusion of an inverted deoxythymidine at the 3′-terminus. The results of this walk are shown in Table 26. Most, but not all, positions tested could accept a phosphorothioate linkage without severely impacting binding. An important exception was the guanine at position 3 (4867-31_410) where substitution of a phosphorothioate linkage for the natural phosphordiester linkage reduced affinity for VEGF121 by 29,259-fold.

[0478] Since nuclease sensitive sites cannot be predicted, the position(s) of the DNase II sensitive cleavage sites were identified by mass spectrometry following incubation with porcine DNase II as described in Example 14 (data not shown). For aptamer 4867-31_192 (with the addition of an inverted deoxythymidine at the 3′-terminus) two major fragments were identified. Fragment one contained nucleotides 1 through 24 while fragment two contained nucleotides 1 through 25. Therefore, a series of aptamers were created in which phosphorothioate linkages were substituted for phosphodiester linkages in various combinations between nucleotide positions 24 and 25, 25 and 26, and 26 and 27 as shown in Table 27. Substitutions at all 3 of these positions were allowed since none significantly affected binding (Table 26). Phosphorothioate substitutions were tested with or without the addition of a 2′-OMe cytosine at position 1 (Table 27). For nuclease stability experiments all subsequent aptamers were studied with the inclusion of an inverted deoxythymidine at the 3′-terminus.

[0479] The susceptibility to DNase II was examined as described in Example 14 and the data presented in FIG. 24. All aptamers tested that had phosphorothioate linkages between positions 24 and 25 and 25 and 26 were more stable in this assay than aptamers that were not modified at these two positions. This trend was observed for aptamers with or without a 2′-OMe at position 1.

[0480] The aptamer 4867-31_192 and a subset of aptamers with phosphorothioate linkages at both key positions were next tested for stability in 90% rabbit vitreous humor (FIG. 25). Because we are considering developing aptamers-based antagonists to VEGF and PDGF for the treatment of ocular disorder, stability in the vitreous humor has relevance for their therapeutic effectiveness. As illustrated in the plot of percent full-length aptamers remaining versus incubation time (FIG. 25), all of the aptamers modified with phosphorothioate linkages were more stable (at 192 hours) in this biological matrix than 4867-31_192 (without phosphorothioate linkages).

[0481] To ensure these substitutions did not adversely affect binding, an experiment was performed to test each aptamer for binding to human VEGF121 protein. All sequences tested retained high affinity binding to target. The dissociation constants (K_{d} values) obtained in this experiment are shown in Table 27.

[0482] FIG. 24 shows the percentage of full-length aptamer remaining versus incubation time with DNase II as described in Example 14. Aptamers (all at 250 nM), as indicated by aptamer identification no. (Aptamer ID No.), were incubated at 37° C. for the indicated number of hours with 0.24 units/μL DNase II and the digestion products separated by polyacrylamide gel electrophoresis. As determined by densitrometry, the percentage of full-length aptamer remaining versus incubation time is plotted. The plot foraptamer ID no. 4867-31_192 in FIG. 24 is the same plot as shown in FIG. 23B.

[0483] FIG. 25 shows the percentage of full-length aptamer remaining versus incubation time in vitreous humor as described in Example 14. Aptamers (all at 500 nM) as indicated by aptamer identification no. (Aptamer ID No.) were incubated at 37° C. for the indicated number of hours in 90% vitreous humor obtained from New Zealand White rabbits. Aptamers were resolved by polyacrylamide gel electrophoresis. FIG. 25 shows the percent remaining of each full-length aptamer band versus time as determined by densitometry.

[0484] In summary, these data, generally, indicate that the 4867-31 aptamer with phosphorothioate linkage(s) is less sensitive to nuclease digestion than the 4867-31 aptamer without phosphorothioate linkage(s), and further, that the 4867-31 aptamer with phosphorothioate linkage(s) retains binding affinity to the VEGF protein target.

### Example 16. PDGF Aptamers with Improved Nuclease Stability

[0485] This Example provides the chemical modifications applied to PDGF aptamers (e.g., 5169-4) that improve the nuclease stability of the aptamers. In this Example, the following abbreviations are used in context with the aptamer: P is NapdU and 2′-OMe is a 2′-O-methyl nucleotide.

[0486] To enhance the nuclease resistance of the NapdU-containing Slow Off Rate Modified Aptamers (SOMAmers) selected to bind to human platelet derived growth factor (PDGFBB), 2′-O-methyl groups (2′-OMe) were added at nucleotide positions in which binding to PDGF protein was not or only minimally affected. These efforts led to the discovery of aptamer 5169-4_146 which contains eleven 2′-OMe groups within the 21 nucleotide sequence. With these eleven 2′-OMe modifications and an inverted deoxythymidine at the 3′-terminus, 5169-4_146 is stable against DNase II, but not against DNAse I (FIG. 26). Therefore, in contrast to the VEGF aptamers 4867-31_192 described in Example 15 which was more sensitive to DNase II than DNase I, PDGF-BB aptamers 5169-4_146 exhibits greater sensitivity to DNase I compared with DNase II. In other words, the sensitivity of 5169-4_146 to DNase I, but not DNase II is opposite to the result found in Example 15 and shows the unpredictability of aptamers sensitivity to nucleases. This suggests that the intrinsic sensitivity to degradation by specific nucleases cannot be predicted and has to be determined empirically. Once this sensitivity to a specific nuclease is determined, additional stability might be achieved with additional phophorothioate substitutions at the remaining sensitive positions. As shown in FIG. 26A, a decrease in full-length aptamer over time indicates sensitivity to digestion by DNase I.

[0487] As shown in FIG. 26, aptamer 5169-4_146 (250 nM) was incubated at 37° C. for the indicated number of hours with 0.01 units/p L DNase I (FIG. 26A) or 0.12 units/μL DNase II (FIG. 26B) as described in Example 14 and the digestion products separated by polyacrylamide gel electrophoresis. As determined by densitrometry, the percentage of full-length aptamer remaining versus incubation time is plotted.

[0488] To determine the feasibility of further stabilizing the aptamer by using phosphorothioate linkages, a “phosphorothioate walk” experiment was performed on 5169-4_146 in order to determine which positions could accept a phosphorothioate without significantly impacting aptamer binding to PDGF. The results of this walk are shown in Table 28. All aptamers tested included an inverted deoxythymidine at the 3′ terminus. Phosphorothioate substitution was well-tolerated at all positions of the 5169-4_146 sequence. The maximum impairment of binding to PDGF was a reduction of affinity by 1.8-fold (5169-4_154).

[0489] Similar to Example 15, the position of the sensitive nucleotides of 5169-4_146 (with an inverted deoxythymidine at the 3′ terminus) to cleavage by DNase I were identified by mass spectrometry and these most sensitive “nuclease sites” protected by substitution of a 3′-phosphorothioate linkage in place of the natural 3′-phosphodiester linkage.

[0490] For aptamer 5169-4_146 several fragments were identified following digestion with human recombinant DNase I. These fragments revealed DNase I sensitive sites between nucleotide position 9 and 10; 10 and 11; 11 and 12; and 12 and 13. Therefore an aptamer was created in which phosphorothioate linkages were substituted for phosphodiester at these four positions and designated as aptamer 5169-4_182 (Table 29). These aptamers were tested for nuclease resistance with the inclusion of an inverted deoxythymidine at the 3′ terminus. The susceptibility to DNase I was examined as before (FIG. 27). The phosphorothioate-containing aptamer was clearly more stable than 5169-4_146.

[0491] As shown in FIG. 27, aptamer 5169-4_182 (250 nM) was incubated at 37° C. for the indicated number of hours with 0.01 units/μL DNase I as described in example 14 and the digestion products separated by polyacrylamide gel electrophoresis. Bands were visualized with SYBR gold and, as determined by densitrometry, the percentage of full-length aptamer remaining versus incubation time is plotted.

[0492] The same aptamer was also tested for stability in 90% rabbit vitreous humor (FIG. 28). As illustrated in the plot of percent full-length aptamers remaining versus incubation time (FIG. 28), aptamer 5169-4_182 (with phosphorothioate linkages) was more stable in this biological matrix than 5169-4_146 (without phosphorothioate linkages).

[0493] As shown in FIG. 28, aptamers (at 500 nM) as indicated were incubated at 37° C. for the indicated number of hours in 90% vitreous humor obtained from New Zealand white rabbits as described in Example 14. Aptamers were visualized by polyacrylamide gel electrophoresis. FIG. 28 shows the percent remaining of each full length aptamer band (SOMAmer) versus time as determined by densitometry.

[0494] Although 5169-4_182 was clearly more stable than 5169-4_146, a DNase I digestion product of 5169-4_182 was clearly visible (data not shown). Using the mass spectrometry described in Example 14, the cleavage site for this major digestion product was identified as between nucleotide positions 4 and 5. This was surprising as nucleotide position 4 was already protected by a 2′-OMe moiety (Table 29). This result illustrates the fact that there are nucleases capable of cleaving phosphodiester bonds adjacent to 2′-OMe-substituted nucleotides. Nonetheless, a 3′-phosphorothioate linkage was substituted for the natural phosphodiester linkage between nucleotide positions 4 and 5 of 5169-4_182 to create aptamer 5169-4_188 (Table 29). The susceptibility to DNase I was examined as before (FIG. 29). Aptamers 5169-4_182 and 5169-4_188 were more stable than 5169-4_146. The addition of a phosphorothioate linkage between nucleotides 4 and 5 in 5169-4_188 eliminated the appearance of the stable digestion product observed for 5169-4_182 (data not shown) which led to a better stability against DNase I (FIG. 29).

[0495] As shown in FIG. 29, aptamers, as indicated by aptamer identification no. (Aptamer ID No.), were incubated at 37° C. for the indicated number of hours with 0.01 units/μL DNase I as described in example 14 and the digestion products separated by polyacrylamide gel electrophoresis. Bands were visualized with SYBR gold and, as determined by densitrometry, the percentage of full-length aptamer remaining versus incubation time is plotted.

[0496] To ensure these substitutions did not adversely affect binding, an experiment was performed to determine the affinity of each aptamers for human PDGFBB protein. All sequences tested retained high affinity binding to target. The dissociation constants (K_{d} values) obtained in this experiment are shown in Table 29.

[0497] In summary, these data, generally, indicate that the 5169-4 aptamer with phosphorothioate linkage(s) are less sensitive to nuclease digestion than the 5169-4 aptamer without phosphorothioate linkage(s), and further, that the 5169-4 aptamer with phosphorothioate linkage(s) retains binding affinity to the PDGF protein target.

### Example 17. Additional PDGF Aptamers with Improved Nuclease Stability

[0498] This Example provides the chemical modifications applied to PDGF aptamers (e.g., 4149-8) that improve the nuclease stability of the aptamers. In this Example, the following abbreviations are used in context with the aptamer: P is a NapdU; 2′-OMe is a 2′-O-methyl nucleotide; Bn is a BenzyldU (BndU); M is a methoxybenzyl (MBndU); V is a 3 carbon spacer; and i is iBudU.

[0499] To enhance the nuclease resistance of the BndU-containing Slow Off Rate Modified Aptamers (SOMAmers) selected to bind to human platelet derived growth factor (PDGFBB), 2′-O-methyl (2′-OMe) groups were added at nucleotide positions in which binding to PDGF protein was not significantly affected. These efforts led to the discovery of aptamer 4149-8_379 which contains seven 2′-OMe groups within the 24 nucleotide sequence. Even with these seven 2′-OMe modifications, 4149-8_379 is still not impervious to nuclease digestion. For example, 4149-8_379 can be digested with recombinant human DNase I (data not shown) and porcine DNase II (FIG. 30). As shown in FIG. 30, a decrease of the full-length aptamer over time indicates sensitivity to digestion by DNase II. This sensitivity to both DNase I and DNase II for 4149-8_379 is different than found for examples 15 and 16 and again shows the unpredictability of the nuclease stability of aptamers.

[0500] As shown in FIG. 30, aptamer 4149-8_379 (250 nM) was incubated at 37° C. for the indicated number of hours with 0.12 units/p L DNase II as described in Example 14 and the digestion products separated by polyacrylamide gel electrophoresis. Bands were visualized with SYBR Gold and, as determined by densitrometry, the percentage of full-length aptamer remaining versus incubation time is plotted.

[0501] In order to further enhance the nuclease resistance of this aptamer, the position of the sensitive nucleotides to the action of DNase I and DNase II were identified by mass spectrometry by the method described in Example 14. DNase I sensitive sites were identified between nucleotide positions 15 and 16 and between nucleotide positions 16 and 17. A DNase II sensitive site was identified between nucleotide positions 9 and 10. Therefore phosphorothioate linkages were substituted for the phosphodiester linkages at these three positions. In addition, a phosphorothioate linkage was substituted for the phosphodiester linkage between nucleotides 17 and 18. Finally the 3, 4 methylene dioxy benzyl-dU nucleotide (or MBndU; designated by M in Tables 30 and 31) at position 2 replaced with a BndU and the BndU at position 16 replaced with a NapdU. This aptamer was designated 4149-8_454 (Table 30). Aptamer 4149-8_455 was created which, in addition to the modifications of 4149-8_454, also contained a 2′-OMe G as position 13 and a phosphorothioate linkage in place of the natural phosphodiester linkage between nucleotides 8 and 9 (Table 30). Although a complete phosphorothioate walk was not performed, a number of sequences were created and tested for affinity to PDGFBB (Table 31). Some of these sequences served as a guide for creating the aptamers are shown in Table 31.

[0502] The susceptibility to DNase II was examined as before (FIG. 31) when all aptamers contained an inverted deoxythymidine at the 3′ terminus. The results show that aptamer 4149-8_455 was more stable than 4149-8_454 which was more stable than 4149-8_379.

[0503] Aptamers 4149-8_379 and 4149-8_454 with the addition of an inverted deoxythymidine at the 3′-terminus were tested for stability in 90% rabbit vitreous humor (data not shown). However, in this biological matrix no additional stability was obtained with 4149-8_454 as compared to 4149-8_379.

[0504] To ensure these substitutions did not adversely affect binding, an experiment was performed to determine the affinity of each aptamer for human PDGFBB protein. All sequences tested retained their binding affinity to the target. The dissociation constants (K_{d} values) obtained in this experiment are shown in Table 30.

[0505] As shown in FIG. 31, the aptamers as indicated by aptamer ID no. (i.e., 4149-8_379; 4149-8_454 and 4149-8_455) were incubated at 37° C. for the indicated number of hours with DNase II and the digestion products separated by polyacrylamide gel electrophoresis. As The percent full-length aptamer, as determined by densitrometry from the gel image, versus incubation time is plotted. The plot for aptamer ID no. 4149-8_379 in FIG. 31 is the same plot as shown in FIG. 30.

[0506] The foregoing embodiments and examples are intended only as examples. No particular embodiment, example, or element of a particular embodiment or example is to be construed as a critical, required, or essential element or feature of any of the claims. Various alterations, modifications, substitutions, and other variations can be made to the disclosed embodiments without departing from the scope of the present invention, which is defined by the appended claims. The specification, including the figures and examples, is to be regarded in an illustrative manner, rather than a restrictive one, and all such modifications and substitutions are intended to be included within the scope of the invention. Accordingly, the scope of the invention should be determined by the appended claims and their legal equivalents, rather than by the examples given above. For example, steps recited in any of the method or process claims may be executed in any feasible order and are not limited to an order presented in any of the embodiments, the examples, or the claims.

TABLE 1
Sequences Representative of the 4149-8_1 and Truncated Variants with K_{d}
values for PDGF of 10 nM or less

| Aptamer ID. No. | Sequence (5′→ 3′) | SEQ ID NO. |
|---|---|---|
| 4149-8_1 | C-G-C-C-C-T-C-G-T-C-C-C-A-T-C-T-C-Bn-Bn-A-C-G-A-C-Bn-A-C- | 1 |
| | G-Bn-Bn-A-C-A-C-G-C-G-Bn-Bn-Bn-A-Bn-A-G-C-G-Bn-C-A-A-C- | |
| | C-C-G-A-G-Bn-G-A-A-C-A-C-C-A-A-C-C-G-A-G-A-A-C-G | |
| 4149-8_2 | A-T-C-T-C-Bn-Bn-A-C-G-A-C-Bn-A-C-G-Bn-Bn-A-C-A-C-G-C-G- | 2 |
| | Bn-Bn-Bn-A-Bn-A-G-C-G-Bn-C-A-A-C-C-C-G-A-G-Bn-G-A-A-C-A | |
| 4149-8_4 | A-T-C-T-C-Bn-Bn-A-C-G-A-C-Bn-A-C-G-Bn-Bn-A-C-A-C-G-C-G- | 3 |
| | Bn-Bn-Bn-A-Bn-A-G-C-G-Bn-C-A-A-C-C-C-G-A-G-Bn-G-A-A | |
| 4149-8_5 | A-T-C-T-C-Bn-Bn-A-C-G-A-C-Bn-A-C-G-Bn-Bn-A-C-A-C-G-C-G- | 4 |
| | Bn-Bn-Bn-A-Bn-A-G-C-G-Bn-C-A-A-C-C-C-G-A-G-Bn-G | |
| 4149-8_6 | A-T-C-T-C-Bn-Bn-A-C-G-A-C-Bn-A-C-G-Bn-Bn-A-C-A-C-G-C-G- | 5 |
| | Bn-Bn-Bn-A-Bn-A-G-C-G-Bn-C-A-A-C-C-C-G-A-G | |
| 4149-8_7 | A-T-C-T-C-Bn-Bn-A-C-G-A-C-Bn-A-C-G-Bn-Bn-A-C-A-C-G-C-G- | 6 |
| | Bn-Bn-Bn-A-Bn-A-G-C-G-Bn-C-A-A-C-C-C-G | |
| 4149-8_8 | A-T-C-T-C-Bn-Bn-A-C-G-A-C-Bn-A-C-G-Bn-Bn-A-C-A-C-G-C-G- | 7 |
| | Bn-Bn-Bn-A-Bn-A-G-C-G-Bn-C-A-A-C-C | |
| 4149-8_9 | A-T-C-T-C-Bn-Bn-A-C-G-A-C-Bn-A-C-G-Bn-Bn-A-C-A-C-G-C-G- | 8 |
| | Bn-Bn-Bn-A-Bn-A-G-C-G-Bn-C-A-A | |
| 4149-8_10 | A-T-C-T-C-Bn-Bn-A-C-G-A-C-Bn-A-C-G-Bn-Bn-A-C-A-C-G-C-G- | 9 |
| | Bn-Bn-Bn-A-Bn-A-G-C-G-Bn-C | |
| 4149-8_11 | C-T-C-Bn-Bn-A-C-G-A-C-Bn-A-C-G-Bn-Bn-A-C-A-C-G-C-G-Bn- | 10 |
| | Bn-Bn-A-Bn-A-G-C-G-Bn-C-A-A-C-C-C-G-A-G-Bn-G-A-A-C-A | |
| 4149-8_12 | C-Bn-Bn-A-C-G-A-C-Bn-A-C-G-Bn-Bn-A-C-A-C-G-C-G-Bn-Bn- | 11 |
| | Bn-A-Bn-A-G-C-G-Bn-C-A-A-C-C-C-G-A-G-Bn-G-A-A-C-A | |
| 4149-8_13 | Bn-A-C-G-A-C-Bn-A-C-G-Bn-Bn-A-C-A-C-G-C-G-Bn-Bn-Bn-A- | 12 |
| | Bn-A-G-C-G-Bn-C-A-A-C-C-C-G-A-G-Bn-G-A-A-C-A | |
| 4149-8_20 | C-Bn-Bn-A-C-G-A-C-Bn-A-C-G-Bn-Bn-A-C-A-C-G-C-G-Bn-Bn- | 13 |
| | Bn-A-Bn-A-G-C-G-Bn-C-A-A-C-C-C-G-A-G-Bn-G-A-A-C | |
| 4149-8_21 | C-Bn-Bn-A-C-G-A-C-Bn-A-C-G-Bn-Bn-A-C-A-C-G-C-G-Bn-Bn- | 14 |
| | Bn-A-Bn-A-G-C-G-Bn-C-A-A-C-C-C-G-A-G-Bn-G-A-A | |
| 4149-8_22 | C-Bn-Bn-A-C-G-A-C-Bn-A-C-G-Bn-Bn-A-C-A-C-G-C-G-Bn-Bn- | 15 |
| | Bn-A-Bn-A-G-C-G-Bn-C-A-A-C-C-C-G-A-G-Bn-G-A | |
| 4149-8_23 | C-Bn-Bn-A-C-G-A-C-Bn-A-C-G-Bn-Bn-A-C-A-C-G-C-G-Bn-Bn- | 16 |
| | Bn-A-Bn-A-G-C-G-Bn-C-A-A-C-C-C-G-A-G-Bn-G | |
| 4149-8_24 | C-Bn-Bn-A-C-G-A-C-Bn-A-C-G-Bn-Bn-A-C-A-C-G-C-G-Bn-Bn- | 17 |
| | Bn-A-Bn-A-G-C-G-Bn-C-A-A-C-C-C-G-A-G-T | |
| 4149-8_25 | C-Bn-Bn-A-C-G-A-C-Bn-A-C-G-Bn-Bn-A-C-A-C-G-C-G-Bn-Bn- | 18 |
| | Bn-A-Bn-A-G-C-G-Bn-C-A-A-C-C-C-G-A-G | |
| 4149-8_26 | C-Bn-Bn-A-C-G-A-C-Bn-A-C-G-Bn-Bn-A-C-A-C-G-C-G-Bn-Bn- | 19 |
| | Bn-A-Bn-A-G-C-G-Bn-C-A-A-C-C-C-G-A | |
| 4149-8_27 | C-T-C-Bn-Bn-A-C-G-A-C-Bn-A-C-G-Bn-Bn-A-C-A-C-G-C-G-Bn- | 20 |
| | Bn-Bn-A-Bn-A-G-C-G-Bn-C | |
| 4149-8_28 | C-Bn-Bn-A-C-G-A-C-Bn-A-C-G-Bn-Bn-A-C-A-C-G-C-G-Bn-Bn- | 21 |
| | Bn-A-Bn-A-G-C-G-Bn-C | |
| 4149-8_29 | C-Bn-Bn-A-C-G-A-C-Bn-A-C-G-Bn-Bn-A-C-A-C-G-C-G-Bn-Bn- | 22 |
| | Bn-A-Bn-A-G-C-G-T | |
| 4149-8_30 | C-Bn-Bn-A-C-G-A-C-Bn-A-C-G-Bn-Bn-A-C-A-C-G-C-G-Bn-Bn- | 23 |
| | Bn-A-Bn-A-G-C-G | |
| 4149-8_31 | C-Bn-Bn-A-C-G-A-C-Bn-A-C-G-Bn-Bn-A-C-A-C-G-C-G-Bn-Bn- | 24 |
| | Bn-A-Bn-A-G-C | |
| 4149-8_32 | C-Bn-Bn-A-C-G-A-C-Bn-A-C-G-Bn-Bn-A-C-A-C-G-C-G-Bn-Bn- | 25 |
| | Bn-A-Bn-A-G | |
| 4149-8_36 | Bn-Bn-A-C-G-A-C-Bn-A-C-G-Bn-Bn-A-C-A-C-G-C-G-Bn-Bn-Bn- | 26 |
| | A-Bn-A-G-C-G-Bn-C | |
| 4149-8_37 | Bn-Bn-A-C-G-A-C-Bn-A-C-G-Bn-Bn-A-C-A-C-G-C-G-Bn-Bn-Bn- | 27 |
| | A-Bn-A-G-C-G-T | |
| 4149-8_38 | Bn-Bn-A-C-G-A-C-Bn-A-C-G-Bn-Bn-A-C-A-C-G-C-G-Bn-Bn-Bn- | 28 |
| | A-Bn-A-G-C-G | |
| 4149-8_39 | Bn-Bn-A-C-G-A-C-Bn-A-C-G-Bn-Bn-A-C-A-C-G-C-G-Bn-Bn-Bn- | 29 |
| | A-Bn-A-G-C | |
| 4149-8_40 | Bn-Bn-A-C-G-A-C-Bn-A-C-G-Bn-Bn-A-C-A-C-G-C-G-Bn-Bn-Bn- | 30 |
| | A-Bn-A-G | |
| 4149-8_44 | Bn-Bn-A¹-C-G-A-C-Bn-A-C-G-Bn-Bn-A-C-A-C-G-C-G-Bn-Bn-Bn- | 31 |
| | A-Bn-A-G-C-G | |
| 4149-8_45 | Bn-Bn-A-C¹-G-A-C-Bn-A-C-G-Bn-Bn-A-C-A-C-G-C-G-Bn-Bn-Bn- | 32 |
| | A-Bn-A-G-C-G | |
| 4149-8_46 | Bn-Bn-A-C-G¹-A-C-Bn-A-C-G-Bn-Bn-A-C-A-C-G-C-G-Bn-Bn-Bn- | 33 |
| | A-Bn-A-G-C-G | |
| 4149-8_47 | Bn-Bn-A-C-G-A¹-C-Bn-A-C-G-Bn-Bn-A-C-A-C-G-C-G-Bn-Bn-Bn- | 34 |
| | A-Bn-A-G-C-G | |
| 4149-8_48 | Bn-Bn-A-C-G-A-C¹-Bn-A-C-G-Bn-Bn-A-C-A-C-G-C-G-Bn-Bn-Bn- | 35 |
| | A-Bn-A-G-C-G | |
| 4149-8_49 | Bn-Bn-A-C-G-A-C-Bn-A¹-C-G-Bn-Bn-A-C-A-C-G-C-G-Bn-Bn-Bn- | 36 |
| | A-Bn-A-G-C-G | |
| 4149-8_50 | Bn-Bn-A-C-G-A-C-Bn-A-C¹-G-Bn-Bn-A-C-A-C-G-C-G-Bn-Bn-Bn- | 37 |
| | A-Bn-A-G-C-G | |
| 4149-8_51 | Bn-Bn-A-C-G-A-C-Bn-A-C-G¹-Bn-Bn-A-C-A-C-G-C-G-Bn-Bn-Bn- | 38 |
| | A-Bn-A-G-C-G | |
| 4149-8_52 | Bn-Bn-A-C-G-A-C-Bn-A-C-G-Bn-Bn-A¹-C-A-C-G-C-G-Bn-Bn-Bn- | 39 |
| | A-Bn-A-G-C-G | |
| 4149-8_53 | Bn-Bn-A-C-G-A-C-Bn-A-C-G-Bn-Bn-A-C¹-A-C-G-C-G-Bn-Bn-Bn- | 40 |
| | A-Bn-A-G-C-G | |
| 4149-8_54 | Bn-Bn-A-C-G-A-C-Bn-A-C-G-Bn-Bn-A-C-A¹-C-G-C-G-Bn-Bn-Bn- | 41 |
| | A-Bn-A-G-C-G | |
| 4149-8_55 | Bn-Bn-A-C-G-A-C-Bn-A-C-G-Bn-Bn-A-C-A-C¹-G-C-G-Bn-Bn-Bn- | 42 |
| | A-Bn-A-G-C-G | |
| 4149-8_56 | Bn-Bn-A-C-G-A-C-Bn-A-C-G-Bn-Bn-A-C-A-C-G¹-C-G-Bn-Bn-Bn- | 43 |
| | A-Bn-A-G-C-G | |
| 4149-8_57 | Bn-Bn-A-C-G-A-C-Bn-A-C-G-Bn-Bn-A-C-A-C-G-C¹-G-Bn-Bn-Bn- | 44 |
| | A-Bn-A-G-C-G | |
| 4149-8_58 | Bn-Bn-A-C-G-A-C-Bn-A-C-G-Bn-Bn-A-C-A-C-G-C-G¹-Bn-Bn-Bn- | 45 |
| | A-Bn-A-G-C-G | |
| 4149-8_59 | Bn-Bn-A-C-G-A-C-Bn-A-C-G-Bn-Bn-A-C-A-C-G-C-G-Bn-Bn-Bn- | 46 |
| | A¹-Bn-A-G-C-G | |
| 4149-8_60 | Bn-Bn-A-C-G-A-C-Bn-A-C-G-Bn-Bn-A-C-A-C-G-C-G-Bn-Bn-Bn- | 47 |
| | A-Bn-A¹-G-C-G | |
| 4149-8_61 | Bn-Bn-A-C-G-A-C-Bn-A-C-G-Bn-Bn-A-C-A-C-G-C-G-Bn-Bn-Bn- | 48 |
| | A-Bn-A-G¹-C-G | |
| 4149-8_62 | Bn-Bn-A-C-G-A-C-Bn-A-C-G-Bn-Bn-A-C-A-C-G-C-G-Bn-Bn-Bn- | 49 |
| | A-Bn-A-G-C¹-G | |
| 4149-8_63 | Bn-Bn-A-C-G-A-C-Bn-A-C-G-Bn-Bn-A-C-A-C-G-C-G-Bn-Bn-Bn- | 50 |
| | A-Bn-A-G-C-G¹ | |
| 4149-8_64 | C3-Bn-A-C-G-A-C-Bn-A-C-G-Bn-Bn-A-C-A-C-G-C-G-Bn-Bn-Bn- | 51 |
| | A-Bn-A-G-C-G | |
| 4149-8_67 | Bn-Bn-A-C3-G-A-C-Bn-A-C-G-Bn-Bn-A-C-A-C-G-C-G-Bn-Bn-Bn- | 52 |
| | A-Bn-A-G-C-G | |
| 4149-8_68 | Bn-Bn-A-C-C3-A-C-Bn-A-C-G-Bn-Bn-A-C-A-C-G-C-G-Bn-Bn-Bn- | 53 |
| | A-Bn-A-G-C-G | |
| 4149-8_69 | Bn-Bn-A-C-G-C3-C-Bn-A-C-G-Bn-Bn-A-C-A-C-G-C-G-Bn-Bn-Bn- | 54 |
| | A-Bn-A-G-C-G | |
| 4149-8_70 | Bn-Bn-A-C-G-A-C3-Bn-A-C-G-Bn-Bn-A-C-A-C-G-C-G-Bn-Bn-Bn- | 55 |
| | A-Bn-A-G-C-G | |
| 4149-8_71 | Bn-Bn-A-C-G-A-C-C3-A-C-G-Bn-Bn-A-C-A-C-G-C-G-Bn-Bn-Bn- | 56 |
| | A-Bn-A-G-C-G | |
| 4149-8_72 | Bn-Bn-A-C-G-A-C-Bn-C3-C-G-Bn-Bn-A-C-A-C-G-C-G-Bn-Bn-Bn- | 57 |
| | A-Bn-A-G-C-G | |
| 4149-8_73 | Bn-Bn-A-C-G-A-C-Bn-A-C3-G-Bn-Bn-A-C-A-C-G-C-G-Bn-Bn-Bn- | 58 |
| | A-Bn-A-G-C-G | |
| 4149-8_78 | Bn-Bn-A-C-G-A-C-Bn-A-C-G-Bn-Bn-A-C3-A-C-G-C-G-Bn-Bn-Bn- | 59 |
| | A-Bn-A-G-C-G | |
| 4149-8_79 | Bn-Bn-A-C-G-A-C-Bn-A-C-G-Bn-Bn-A-C-C3-C-G-C-G-Bn-Bn-Bn- | 60 |
| | A-Bn-A-G-C-G | |
| 4149-8_80 | Bn-Bn-A-C-G-A-C-Bn-A-C-G-Bn-Bn-A-C-A-C3-G-C-G-Bn-Bn-Bn- | 61 |
| | A-Bn-A-G-C-G | |
| 4149-8_87 | Bn-Bn-A-C-G-A-C-Bn-A-C-G-Bn-Bn-A-C-A-C-G-C-G-Bn-Bn-Bn- | 62 |
| | C3-Bn-A-G-C-G | |
| 4149-8_91 | Bn-Bn-A-C-G-A-C-Bn-A-C-G-Bn-Bn-A-C-A-C-G-C-G-Bn-Bn-Bn- | 63 |
| | A-Bn-A-G-C3-G | |
| 4149-8_92 | Bn-Bn-A-C-G-A-C-Bn-A-C-G-Bn-Bn-A-C-A-C-G-C-G-Bn-Bn-Bn- | 64 |
| | A-Bn-A-G-C-C3 | |
| 4149-8_93 | Bn-Bn-A¹-C-G-A¹-C-Bn-A¹-C-G-Bn-Bn-A-C-A¹-C-G¹-C-G-Bn-Bn- | 65 |
| | Bn-A¹-Bn-A¹-G¹-C¹-G¹ | |
| 4149-8_94 | Bn-Bn-A¹-C-G-A-C-Bn-A¹-C-G-Bn-Bn-A-C-A¹-C-G-C-G-Bn-Bn- | 66 |
| | Bn-A-Bn-A¹-G-C-G¹ | |
| 4149-8_95 | Bn-Bn-A-C-Heg-G-Bn-Bn-A-C-A-C-G-C-G-Bn-Bn-Bn-A-Bn-A-G- | 67 |
| | C-G | |
| 4149-8_96 | Bn-Bn-A-C-Heg-Heg-G-Bn-Bn-A-C-A-C-G-C-G-Bn-Bn-Bn-A-Bn- | 68 |
| | A-G-C-G | |
| 4149-8_97 | Bn-Bn-A-C-G-Heg-C-G-Bn-Bn-A-C-A-C-G-C-G-Bn-Bn-Bn-A-Bn- | 69 |
| | A-G-C-G | |
| 4149-8_98 | Bn-Bn-A-C-C3-C3-C3-C3-C3-C3-G-Bn-Bn-A-C-A-C-G-C-G-Bn- | 70 |
| | Bn-Bn-A-Bn-A-G-C-G | |
| 4149-8_99 | Bn-Bn-A-C-C3-C3-C3-C3-G-Bn-Bn-A-C-A-C-G-C-G-Bn-Bn-Bn-A- | 71 |
| | Bn-A-G-C-G | |
| 4149-8_100 | Bn-Bn-A-C-C3-C3-G-Bn-Bn-A-C-A-C-G-C-G-Bn-Bn-Bn-A-Bn-A- | 72 |
| | G-C-G | |
| 4149-8_101 | Bn-Bn-A¹-C-G-C3-C-C3-C3-C-G-Bn-Bn-A-C-A¹-C-G¹-C-G-Bn-Bn- | 73 |
| | Bn-A¹-Bn-A¹-G¹-C-G¹ | |
| 4149-8_103 | U¹-Bn-A-C-G-A-C-Bn-A-C-G-Bn-Bn-A-C-A-C-G-C-G-Bn-Bn-Bn-A- | 74 |
| | Bn-A-G-C-G | |
| 4149-8_105 | Bn-Bn-A-C-G-A-C-U¹-A-C-G-Bn-Bn-A-C-A-C-G-C-G-Bn-Bn-Bn-A- | 75 |
| | Bn-A-G-C-G | |
| 4149-8_106 | Bn-Bn-A-C-G-A-C-Bn-A-C-G-U¹-Bn-A-C-A-C-G-C-G-Bn-Bn-Bn-A- | 76 |
| | Bn-A-G-C-G | |
| 4149-8_110 | Bn-Bn-A-C-G-A-C-Bn-A-C-G-Bn-Bn-A-C-A-C-G-C-G-Bn-Bn-U¹-A- | 77 |
| | Bn-A-G-C-G | |
| 4149-8_112 | Bn-Nap-A-C-G-A-C-Bn-A-C-G-Bn-Bn-A-C-A-C-G-C-G-Bn-Bn-Bn- | 78 |
| | A-Bn-A-G-C-G | |
| 4149-8_113 | Bn-Bn-A-C-G-A-C-Nap-A-C-G-Bn-Bn-A-C-A-C-G-C-G-Bn-Bn-Bn- | 79 |
| | A-Bn-A-G-C-G | |
| 4149-8_114 | Bn-Bn-A-C-G-A-C-Bn-A-C-G-Nap-Bn-A-C-A-C-G-C-G-Bn-Bn-Bn- | 80 |
| | A-Bn-A-G-C-G | |
| 4149-8_115 | Bn-Bn-A-C-G-A-C-Bn-A-C-G-Bn-Nap-A-C-A-C-G-C-G-Bn-Bn-Bn- | 81 |
| | A-Bn-A-G-C-G | |
| 4149-8_116 | Bn-Bn-A-C-G-A-C-Bn-A-C-G-Bn-Bn-A-C-A-C-G-C-G-Nap-Bn-Bn- | 82 |
| | A-Bn-A-G-C-G | |
| 4149-8_117 | Bn-Bn-A-C-G-A-C-Bn-A-C-G-Bn-Bn-A-C-A-C-G-C-G-Bn-Nap-Bn- | 83 |
| | A-Bn-A-G-C-G | |
| 4149-8_118 | Bn-Bn-A-C-G-A-C-Bn-A-C-G-Bn-Bn-A-C-A-C-G-C-G-Bn-Bn-Nap- | 84 |
| | A-Bn-A-G-C-G | |
| 4149-8_119 | Bn-Bn-A-C-G-A-C-Bn-A-C-G-Bn-Bn-A-C-A-C-G-C-G-Bn-Bn-Bn- | 85 |
| | A-Nap-A-G-C-G | |
| 4149-8_121 | Nap-Bn-A-C-G-A-C-Bn-A-C-G-Bn-Bn-A-C-A-C-G-C-G-Bn-Bn-Bn- | 86 |
| | A-Bn-A-G-C-G | |
| 4149-8_122 | Bn-Bn-A-C-G-A-C-Bn-A-C-G-Bn-Bn-A-C-A-C-G-C-G-Bn-Bn-Bn- | 87 |
| | A-U¹-A-G-C-G | |
| 4149-8_123 | Bn-Bn-A¹-C-Heg-Heg-G-Bn-Bn-A-C-A¹-C-G-C-G-Bn-Bn-Bn-A- | 88 |
| | Bn-A¹-G-C-G¹ | |
| 4149-8_124 | Bn-Bn-A-C-Heg-Heg-G-Bn-Bn-A-C-A-C-G-C-G-Nap-Bn-Bn-A- | 89 |
| | Bn-A-G-C-G | |
| 4149-8_125 | Bn-Bn-A-C-Heg-Heg-G-U¹-Bn-A-C-A-C-G-C-G-Bn-Bn-Bn-A-Bn- | 90 |
| | A-G-C-G | |
| 4149-8_126 | Bn-Bn-A¹-C-Heg-Heg-G-U¹-Bn-A-C-A¹-C-G-C-G-Nap-Bn-Bn-A- | 91 |
| | Bn-A¹-G-C-G¹ | |
| 4149-8_128 | Bn-Nap-A¹-C-Heg-Heg-G-Nap-Nap-A-C-A¹-C-G-C-G-Nap-Nap- | 92 |
| | Bn-A-Nap-A¹-G-C-G¹ | |
| 4149-8_130 | Bn-Bn-A¹-C-Heg-G-Bn-Bn-A-C-A¹-C-G-C-G-Bn-Bn-Bn-A-Bn-A¹- | 93 |
| | G-C-G¹ | |
| 4149-8_131 | Bn-Bn-A-C-Heg-G-Bn-Bn-A-C-A-C-G-C-G-Nap-Bn-Bn-A-Bn-A- | 94 |
| | G-C-G | |
| 4149-8_132 | Bn-Bn-A-C-Heg-G-U¹-Bn-A-C-A-C-G-C-G-Bn-Bn-Bn-A-Bn-A-G- | 95 |
| | C-G | |
| 4149-8_133 | Bn-Bn-A¹-C-Heg-G-U¹-Bn-A-C-A¹-C-G-C-G-Nap-Bn-Bn-A-Bn-A¹- | 96 |
| | G-C-G¹ | |
| 4149-8_135 | Pe-Bn-A¹-C-Heg-G-Bn-Bn-A-C-A¹-C-G-C-G-Bn-Bn-Bn-A-Bn-A¹- | 97 |
| | G-C-G¹ | |
| 4149-8_136 | Bn-Pe-A¹-C-Heg-G-Bn-Bn-A-C-A¹-C-G-C-G-Bn-Bn-Bn-A-Bn-A¹- | 98 |
| | G-C-G¹ | |
| 4149-8_137 | Bn-Bn-A¹-C-Heg-G-Pe-Bn-A-C-A¹-C-G-C-G-Bn-Bn-Bn-A-Bn-A¹- | 99 |
| | G-C-G¹ | |
| 4149-8_138 | Bn-Bn-A¹-C-Heg-G-Bn-Pe-A-C-A¹-C-G-C-G-Bn-Bn-Bn-A-Bn-A¹- | 100 |
| | G-C-G¹ | |
| 4149-8_139 | Bn-Bn-A¹-C-Heg-G-Bn-Bn-A-C-A¹-C-G-C-G-Pe-Bn-Bn-A-Bn-A¹- | 101 |
| | G-C-G¹ | |
| 4149-8_140 | Bn-Bn-A¹-C-Heg-G-Bn-Bn-A-C-A¹-C-G-C-G-Bn-Pe-Bn-A-Bn-A¹- | 102 |
| | G-C-G¹ | |
| 4149-8_141 | Bn-Bn-A¹-C-Heg-G-Bn-Bn-A-C-A¹-C-G-C-G-Bn-Bn-Pe-A-Bn-A¹- | 103 |
| | G-C-G¹ | |
| 4149-8_142 | Bn-Bn-A¹-C-Heg-G-Bn-Bn-A-C-A¹-C-G-C-G-Bn-Bn-Bn-A-Pe-A¹- | 104 |
| | G-C-G¹ | |
| 4149-8_143 | BT-Bn-A¹-C-Heg-G-Bn-Bn-A-C-A¹-C-G-C-G-Bn-Bn-Bn-A-Bn-A¹- | 105 |
| | G-C-G¹ | |
| 4149-8_144 | Bn-BT-A¹-C-Heg-G-Bn-Bn-A-C-A¹-C-G-C-G-Bn-Bn-Bn-A-Bn-A¹- | 106 |
| | G-C-G¹ | |
| 4149-8_145 | Bn-Bn-A¹-C-Heg-G-BT-Bn-A-C-A¹-C-G-C-G-Bn-Bn-Bn-A-Bn-A¹- | 107 |
| | G-C-G¹ | |
| 4149-8_146 | Bn-Bn-A¹-C-Heg-G-Bn-BT-A-C-A¹-C-G-C-G-Bn-Bn-Bn-A-Bn-A¹- | 108 |
| | G-C-G¹ | |
| 4149-8_147 | Bn-Bn-A¹-C-Heg-G-Bn-Bn-A-C-A¹-C-G-C-G-BT-Bn-Bn-A-Bn-A¹- | 109 |
| | G-C-G¹ | |
| 4149-8_148 | Bn-Bn-A¹-C-Heg-G-Bn-Bn-A-C-A¹-C-G-C-G-Bn-BT-Bn-A-Bn-A¹- | 110 |
| | G-C-G¹ | |
| 4149-8_149 | Bn-Bn-A¹-C-Heg-G-Bn-Bn-A-C-A¹-C-G-C-G-Bn-Bn-BT-A-Bn-A¹- | 111 |
| | G-C-G¹ | |
| 4149-8_150 | Bn-Bn-A¹-C-Heg-G-Bn-Bn-A-C-A¹-C-G-C-G-Bn-Bn-Bn-A-BT-A¹- | 112 |
| | G-C-G¹ | |
| 4149-8_151 | Th-Bn-A¹-C-Heg-G-Bn-Bn-A-C-A¹-C-G-C-G-Bn-Bn-Bn-A-Bn-A¹- | 113 |
| | G-C-G¹ | |
| 4149-8_152 | Bn-Th-A¹-C-Heg-G-Bn-Bn-A-C-A¹-C-G-C-G-Bn-Bn-Bn-A-Bn-A¹- | 114 |
| | G-C-G¹ | |
| 4149-8_153 | Bn-Bn-A¹-C-Heg-G-Th-Bn-A-C-A¹-C-G-C-G-Bn-Bn-Bn-A-Bn-A¹- | 115 |
| | G-C-G¹ | |
| 4149-8_154 | Bn-Bn-A¹-C-Heg-G-Bn-Th-A-C-A¹-C-G-C-G-Bn-Bn-Bn-A-Bn-A¹- | 116 |
| | G-C-G¹ | |
| 4149-8_155 | Bn-Bn-A¹-C-Heg-G-Bn-Bn-A-C-A¹-C-G-C-G-Th-Bn-Bn-A-Bn-A¹- | 117 |
| | G-C-G¹ | |
| 4149-8_156 | Bn-Bn-A¹-C-Heg-G-Bn-Bn-A-C-A¹-C-G-C-G-Bn-Th-Bn-A-Bn-A¹- | 118 |
| | G-C-G¹ | |
| 4149-8_157 | Bn-Bn-A¹-C-Heg-G-Bn-Bn-A-C-A¹-C-G-C-G-Bn-Bn-Th-A-Bn-A¹- | 119 |
| | G-C-G¹ | |
| 4149-8_158 | Bn-Bn-A¹-C-Heg-G-Bn-Bn-A-C-A¹-C-G-C-G-Bn-Bn-Bn-A-Th-A¹- | 120 |
| | G-C-G¹ | |
| 4149-8_159 | Nap-Bn-A¹-C-Heg-G-Bn-Bn-A-C-A¹-C-G-C-G-Bn-Bn-Bn-A-Bn-A¹- | 121 |
| | G-C-G¹ | |
| 4149-8_160 | Bn-Nap-A¹-C-Heg-G-Bn-Bn-A-C-A¹-C-G-C-G-Bn-Bn-Bn-A-Bn-A¹- | 122 |
| | G-C-G¹ | |
| 4149-8_161 | Bn-Bn-A¹-C-Heg-G-Nap-Bn-A-C-A¹-C-G-C-G-Bn-Bn-Bn-A-Bn-A¹- | 123 |
| | G-C-G¹ | |
| 4149-8_162 | Bn-Bn-A¹-C-Heg-G-Bn-Nap-A-C-A¹-C-G-C-G-Bn-Bn-Bn-A-Bn-A¹- | 124 |
| | G-C-G¹ | |
| 4149-8_163 | Bn-Bn-A¹-C-Heg-G-Bn-Bn-A-C-A¹-C-G-C-G-Nap-Bn-Bn-A-Bn-A¹- | 125 |
| | G-C-G¹ | |
| 4149-8_164 | Bn-Bn-A¹-C-Heg-G-Bn-Bn-A-C-A¹-C-G-C-G-Bn-Nap-Bn-A-Bn-A¹- | 126 |
| | G-C-G¹ | |
| 4149-8_165 | Bn-Bn-A¹-C-Heg-G-Bn-Bn-A-C-A¹-C-G-C-G-Bn-Bn-Nap-A-Bn-A¹- | 127 |
| | G-C-G¹ | |
| 4149-8_166 | Bn-Bn-A¹-C-Heg-G-Bn-Bn-A-C-A¹-C-G-C-G-Bn-Bn-Bn-A-Nap-A¹- | 128 |
| | G-C-G¹ | |
| 4149-8_167 | Ib-Bn-A¹-C-Heg-G-Bn-Bn-A-C-A¹-C-G-C-G-Bn-Bn-Bn-A-Bn-A¹-G- | 129 |
| | C-G¹ | |
| 4149-8_168 | Bn-Ib-A¹-C-Heg-G-Bn-Bn-A-C-A¹-C-G-C-G-Bn-Bn-Bn-A-Bn-A¹-G- | 130 |
| | C-G¹ | |
| 4149-8_169 | Bn-Bn-A¹-C-Heg-G-Ib-Bn-A-C-A¹-C-G-C-G-Bn-Bn-Bn-A-Bn-A¹-G- | 131 |
| | C-G¹ | |
| 4149-8_170 | Bn-Bn-A¹-C-Heg-G-Bn-Ib-A-C-A¹-C-G-C-G-Bn-Bn-Bn-A-Bn-A¹-G- | 132 |
| | C-G¹ | |
| 4149-8_171 | Bn-Bn-A¹-C-Heg-G-Bn-Bn-A-C-A¹-C-G-C-G-Ib-Bn-Bn-A-Bn-A¹-G- | 133 |
| | C-G¹ | |
| 4149-8_172 | Bn-Bn-A¹-C-Heg-G-Bn-Bn-A-C-A¹-C-G-C-G-Bn-Ib-Bn-A-Bn-A¹-G- | 134 |
| | C-G¹ | |
| 4149-8_173 | Bn-Bn-A¹-C-Heg-G-Bn-Bn-A-C-A¹-C-G-C-G-Bn-Bn-Ib-A-Bn-A¹-G- | 135 |
| | C-G¹ | |
| 4149-8_174 | Bn-Bn-A¹-C-Heg-G-Bn-Bn-A-C-A¹-C-G-C-G-Bn-Bn-Bn-A-Ib-A¹-G- | 136 |
| | C-G¹ | |
| 4149-8_175 | Trp-Bn-A¹-C-Heg-G-Bn-Bn-A-C-A¹-C-G-C-G-Bn-Bn-Bn-A-Bn-A¹- | 137 |
| | G-C-G¹ | |
| 4149-8_176 | Bn-Trp-A¹-C-Heg-G-Bn-Bn-A-C-A¹-C-G-C-G-Bn-Bn-Bn-A-Bn-A¹- | 138 |
| | G-C-G¹ | |
| 4149-8_177 | Bn-Bn-A¹-C-Heg-G-Trp-Bn-A-C-A¹-C-G-C-G-Bn-Bn-Bn-A-Bn-A¹- | 139 |
| | G-C-G¹ | |
| 4149-8_181 | Bn-Bn-A¹-C-Heg-G-Bn-Bn-A-C-A¹-C-G-C-G-Bn-Bn-Trp-A-Bn-A¹- | 140 |
| | G-C-G¹ | |
| 4149-8_182 | Bn-Bn-A¹-C-Heg-G-Bn-Bn-A-C-A¹-C-G-C-G-Bn-Bn-Bn-A-Trp-A¹- | 141 |
| | G-C-G¹ | |
| 4149-8_183 | 2Nap-Bn-A¹-C-Heg-G-Bn-Bn-A-C-A¹-C-G-C-G-Bn-Bn-Bn-A-Bn- | 142 |
| | A¹-G-C-G¹ | |
| 4149-8_184 | Bn-2Nap-A¹-C-Heg-G-Bn-Bn-A-C-A¹-C-G-C-G-Bn-Bn-Bn-A-Bn- | 143 |
| | A¹-G-C-G¹ | |
| 4149-8_185 | Bn-Bn-A¹-C-Heg-G-2Nap-Bn-A-C-A¹-C-G-C-G-Bn-Bn-Bn-A-Bn- | 144 |
| | A¹-G-C-G¹ | |
| 4149-8_187 | Bn-Bn-A¹-C-Heg-G-Bn-Bn-A-C-A¹-C-G-C-G-2Nap-Bn-Bn-A-Bn- | 145 |
| | A¹-G-C-G¹ | |
| 4149-8_188 | Bn-Bn-A¹-C-Heg-G-Bn-Bn-A-C-A¹-C-G-C-G-Bn-2Nap-Bn-A-Bn- | 146 |
| | A¹-G-C-G¹ | |
| 4149-8_189 | Bn-Bn-A¹-C-Heg-G-Bn-Bn-A-C-A¹-C-G-C-G-Bn-Bn-2Nap-A-Bn- | 147 |
| | A¹-G-C-G¹ | |
| 4149-8_190 | Bn-Bn-A¹-C-Heg-G-Bn-Bn-A-C-A¹-C-G-C-G-Bn-Bn-Bn-A-2Nap- | 148 |
| | A¹-G-C-G¹ | |
| 4149-8_191 | 2NE-Bn-A¹-C-Heg-G-Bn-Bn-A-C-A¹-C-G-C-G-Bn-Bn-Bn-A-Bn-A¹- | 149 |
| | G-C-G¹ | |
| 4149-8_192 | Bn-2NE-A¹-C-Heg-G-Bn-Bn-A-C-A¹-C-G-C-G-Bn-Bn-Bn-A-Bn-A¹- | 150 |
| | G-C-G¹ | |
| 4149-8_193 | Bn-Bn-A¹-C-Heg-G-2NE-Bn-A-C-A¹-C-G-C-G-Bn-Bn-Bn-A-Bn-A¹- | 151 |
| | G-C-G¹ | |
| 4149-8_194 | Bn-Bn-A¹-C-Heg-G-Bn-2NE-A-C-A¹-C-G-C-G-Bn-Bn-Bn-A-Bn-A¹- | 152 |
| | G-C-G¹ | |
| 4149-8_195 | Bn-Bn-A¹-C-Heg-G-Bn-Bn-A-C-A¹-C-G-C-G-2NE-Bn-Bn-A-Bn-A¹- | 153 |
| | G-C-G¹ | |
| 4149-8_197 | Bn-Bn-A¹-C-Heg-G-Bn-Bn-A-C-A¹-C-G-C-G-Bn-Bn-2NE-A-Bn-A¹- | 154 |
| | G-C-G¹ | |
| 4149-8_198 | Bn-Bn-A¹-C-Heg-G-Bn-Bn-A-C-A¹-C-G-C-G-Bn-Bn-Bn-A-2NE-A¹- | 155 |
| | G-C-G¹ | |
| 4149-8_199 | NE-Bn-A¹-C-Heg-G-Bn-Bn-A-C-A¹-C-G-C-G-Bn-Bn-Bn-A-Bn-A¹- | 156 |
| | G-C-G¹ | |
| 4149-8_200 | Bn-NE-A¹-C-Heg-G-Bn-Bn-A-C-A¹-C-G-C-G-Bn-Bn-Bn-A-Bn-A¹- | 157 |
| | G-C-G¹ | |
| 4149-8_201 | Bn-Bn-A¹-C-Heg-G-NE-Bn-A-C-A¹-C-G-C-G-Bn-Bn-Bn-A-Bn-A¹- | 158 |
| | G-C-G¹ | |
| 4149-8_202 | Bn-Bn-A¹-C-Heg-G-Bn-NE-A-C-A¹-C-G-C-G-Bn-Bn-Bn-A-Bn-A¹- | 159 |
| | G-C-G¹ | |
| 4149-8_203 | Bn-Bn-A¹-C-Heg-G-Bn-Bn-A-C-A¹-C-G-C-G-NE-Bn-Bn-A-Bn-A¹- | 160 |
| | G-C-G¹ | |
| 4149-8_204 | Bn-Bn-A¹-C-Heg-G-Bn-Bn-A-C-A¹-C-G-C-G-Bn-NE-Bn-A-Bn-A¹- | 161 |
| | G-C-G¹ | |
| 4149-8_205 | Bn-Bn-A¹-C-Heg-G-Bn-Bn-A-C-A¹-C-G-C-G-Bn-Bn-NE-A-Bn-A¹- | 162 |
| | G-C-G¹ | |
| 4149-8_206 | Bn-Bn-A¹-C-Heg-G-Bn-Bn-A-C-A¹-C-G-C-G-Bn-Bn-Bn-A-NE-A¹- | 163 |
| | G-C-G¹ | |
| 4149-8_207 | MBn-Bn-A¹-C-Heg-G-Bn-Bn-A-C-A¹-C-G-C-G-Bn-Bn-Bn-A-Bn- | 164 |
| | A¹-G-C-G¹ | |
| 4149-8_208 | Bn-MBn-A¹-C-Heg-G-Bn-Bn-A-C-A¹-C-G-C-G-Bn-Bn-Bn-A-Bn- | 165 |
| | A¹-G-C-G¹ | |
| 4149-8_209 | Bn-Bn-A¹-C-Heg-G-MBn-Bn-A-C-A¹-C-G-C-G-Bn-Bn-Bn-A-Bn- | 166 |
| | A¹-G-C-G¹ | |
| 4149-8_210 | Bn-Bn-A¹-C-Heg-G-Bn-MBn-A-C-A¹-C-G-C-G-Bn-Bn-Bn-A-Bn- | 167 |
| | A¹-G-C-G¹ | |
| 4149-8_211 | Bn-Bn-A¹-C-Heg-G-Bn-Bn-A-C-A¹-C-G-C-G-MBn-Bn-Bn-A-Bn- | 168 |
| | A¹-G-C-G¹ | |
| 4149-8_212 | Bn-Bn-A¹-C-Heg-G-Bn-Bn-A-C-A¹-C-G-C-G-Bn-MBn-Bn-A-Bn- | 169 |
| | A¹-G-C-G¹ | |
| 4149-8_213 | Bn-Bn-A¹-C-Heg-G-Bn-Bn-A-C-A¹-C-G-C-G-Bn-Bn-MBn-A-Bn- | 170 |
| | A¹-G-C-G¹ | |
| 4149-8_214 | Bn-Bn-A¹-C-Heg-G-Bn-Bn-A-C-A¹-C-G-C-G-Bn-Bn-Bn-A-MBn- | 171 |
| | A¹-G-C-G¹ | |
| 4149-8_215 | PP-Bn-A¹-C-Heg-G-Bn-Bn-A-C-A¹-C-G-C-G-Bn-Bn-Bn-A-Bn-A¹- | 172 |
| | G-C-G¹ | |
| 4149-8_216 | Bn-PP-A¹-C-Heg-G-Bn-Bn-A-C-A¹-C-G-C-G-Bn-Bn-Bn-A-Bn-A¹- | 173 |
| | G-C-G¹ | |
| 4149-8_217 | Bn-Bn-A¹-C-Heg-G-PP-Bn-A-C-A¹-C-G-C-G-Bn-Bn-Bn-A-Bn-A¹- | 174 |
| | G-C-G¹ | |
| 4149-8_218 | Bn-Bn-A¹-C-Heg-G-Bn-PP-A-C-A¹-C-G-C-G-Bn-Bn-Bn-A-Bn-A¹- | 175 |
| | G-C-G¹ | |
| 4149-8_219 | Bn-Bn-A¹-C-Heg-G-Bn-Bn-A-C-A¹-C-G-C-G-PP-Bn-Bn-A-Bn-A¹- | 176 |
| | G-C-G¹ | |
| 4149-8_220 | Bn-Bn-A¹-C-Heg-G-Bn-Bn-A-C-A¹-C-G-C-G-Bn-PP-Bn-A-Bn-A¹- | 177 |
| | G-C-G¹ | |
| 4149-8_221 | Bn-Bn-A¹-C-Heg-G-Bn-Bn-A-C-A¹-C-G-C-G-Bn-Bn-PP-A-Bn-A¹- | 178 |
| | G-C-G¹ | |
| 4149-8_222 | Bn-Bn-A¹-C-Heg-G-Bn-Bn-A-C-A¹-C-G-C-G-Bn-Bn-Bn-A-PP-A¹- | 179 |
| | G-C-G¹ | |
| 4149-8_223 | Tyr-Bn-A¹-C-Heg-G-Bn-Bn-A-C-A¹-C-G-C-G-Bn-Bn-Bn-A-Bn-A¹- | 180 |
| | G-C-G¹ | |
| 4149-8_224 | Bn-Tyr-A¹-C-Heg-G-Bn-Bn-A-C-A¹-C-G-C-G-Bn-Bn-Bn-A-Bn-A¹- | 181 |
| | G-C-G¹ | |
| 4149-8_225 | Bn-Bn-A¹-C-Heg-G-Tyr-Bn-A-C-A¹-C-G-C-G-Bn-Bn-Bn-A-Bn-A¹- | 182 |
| | G-C-G¹ | |
| 4149-8_226 | Bn-Bn-A¹-C-Heg-G-Bn-Tyr-A-C-A¹-C-G-C-G-Bn-Bn-Bn-A-Bn-A¹- | 183 |
| | G-C-G¹ | |
| 4149-8_227 | Bn-Bn-A¹-C-Heg-G-Bn-Bn-A-C-A¹-C-G-C-G-Tyr-Bn-Bn-A-Bn-A¹- | 184 |
| | G-C-G¹ | |
| 4149-8_228 | Bn-Bn-A¹-C-Heg-G-Bn-Bn-A-C-A¹-C-G-C-G-Bn-Tyr-Bn-A-Bn-A¹- | 185 |
| | G-C-G¹ | |
| 4149-8_229 | Bn-Bn-A¹-C-Heg-G-Bn-Bn-A-C-A¹-C-G-C-G-Bn-Bn-Tyr-A-Bn-A¹- | 186 |
| | G-C-G¹ | |
| 4149-8_230 | Bn-Bn-A¹-C-Heg-G-Bn-Bn-A-C-A¹-C-G-C-G-Bn-Bn-Bn-A-Tyr-A¹- | 187 |
| | G-C-G¹ | |
| 4149-8_231 | FBn-Bn-A¹-C-Heg-G-Bn-Bn-A-C-A¹-C-G-C-G-Bn-Bn-Bn-A-Bn-A¹- | 188 |
| | G-C-G¹ | |
| 4149-8_232 | Bn-FBn-A¹-C-Heg-G-Bn-Bn-A-C-A¹-C-G-C-G-Bn-Bn-Bn-A-Bn-A¹- | 189 |
| | G-C-G¹ | |
| 4149-8_233 | Bn-Bn-A¹-C-Heg-G-FBn-Bn-A-C-A¹-C-G-C-G-Bn-Bn-Bn-A-Bn-A¹- | 190 |
| | G-C-G¹ | |
| 4149-8_234 | Bn-Bn-A¹-C-Heg-G-Bn-FBn-A-C-A¹-C-G-C-G-Bn-Bn-Bn-A-Bn-A¹- | 191 |
| | G-C-G¹ | |
| 4149-8_235 | Bn-Bn-A¹-C-Heg-G-Bn-Bn-A-C-A¹-C-G-C-G-FBn-Bn-Bn-A-Bn-A¹- | 192 |
| | G-C-G¹ | |
| 4149-8_236 | Bn-Bn-A¹-C-Heg-G-Bn-Bn-A-C-A¹-C-G-C-G-Bn-FBn-Bn-A-Bn-A¹- | 193 |
| | G-C-G¹ | |
| 4149-8_237 | Bn-Bn-A¹-C-Heg-G-Bn-Bn-A-C-A¹-C-G-C-G-Bn-Bn-FBn-A-Bn-A¹- | 194 |
| | G-C-G¹ | |
| 4149-8_238 | Bn-Bn-A¹-C-Heg-G-Bn-Bn-A-C-A¹-C-G-C-G-Bn-Bn-Bn-A-FBn-A¹- | 195 |
| | G-C-G¹ | |
| 4149-8_239 | Bn-Bn-A¹-C^{o-Heg-G-Bn-Bn-A-C-A}¹-C-G-C-G-Bn-Bn-Bn-A-Bn-A¹- | 196 |
| | G-C-G¹ | |
| 4149-8_240 | Bn-Bn-A¹-C-Heg-G-Bn-Bn-A-C^{o-A}¹-C-G-C-G-Bn-Bn-Bn-A-Bn-A¹- | 197 |
| | G-C-G¹ | |
| 4149-8_241 | Bn-Bn-A¹-C-Heg-G-Bn-Bn-A-C-A¹-C^{o-G-C-G-Bn-Bn-Bn-A-Bn-A}¹- | 198 |
| | G-C-G¹ | |
| 4149-8_242 | Bn-Bn-A¹-C-Heg-G-Bn-Bn-A-C-A¹-C-G-C^{o-G-Bn-Bn-Bn-A-Bn-A}¹- | 199 |
| | G-C-G¹ | |
| 4149-8_243 | Bn-Bn-A¹-C-Heg-G-Bn-Bn-A-C-A¹-C-G-C-G-Bn-Bn-Bn-A-Bn-A¹- | 200 |
| | G-C^{o-G}¹ | |
| 4149-8_245 | Bn-Bn-A¹-C-Heg-G-Bn-Bn-A-C-A¹-C-G-C-G-Bn-Bn-Bn-A¹-Bn-A¹- | 201 |
| | G-C-G¹ | |
| 4149-8_246 | Bn-Bn-A¹-C-Heg-G¹-Bn-Bn-A-C-A¹-C-G-C-G-Bn-Bn-Bn-A-Bn-A¹- | 202 |
| | G-C-G¹ | |
| 4149-8_247 | Bn-Bn-A¹-C-Heg-G-Bn-Bn-A-C-A¹-C-G¹-C-G-Bn-Bn-Bn-A-Bn-A¹- | 203 |
| | G-C-G¹ | |
| 4149-8_248 | Bn-Bn-A¹-C-Heg-G-Bn-Bn-A-C-A¹-C-G-C-G¹-Bn-Bn-Bn-A-Bn-A¹- | 204 |
| | G-C-G¹ | |
| 4149-8_249 | Bn-Bn-A¹-C-Heg-G-Bn-Bn-A-C-A¹-C-G-C-G-Bn-Bn-Bn-A-Bn-A¹- | 205 |
| | G¹-C-G¹ | |
| 4149-8_254 | Tyr-Bn-A¹-C-Heg-G-FBn-Bn-A-C-A¹-C-G-C-G-2Nap-Bn-Bn-A-Bn- | 206 |
| | A¹-G-C-G¹ | |
| 4149-8_255 | Bn-Bn-A¹-C-Heg-G-Bn-lb-A-C-A¹-C-G-C-G-Bn-Pe-Th-A-Bn-A¹-G- | 207 |
| | C-G¹ | |
| 4149-8_256 | Bn-Bn-A¹-C-Heg-G-2Nap-lb-A-C-A¹-C-G-C-G-Bn-Bn-Bn-A-Bn- | 208 |
| | A¹-G-C-G¹ | |
| 4149-8_257 | Bn-Bn-A¹-C-Heg-G-NE-lb-A-C-A¹-C-G-C-G-Bn-Bn-Bn-A-Bn-A¹- | 209 |
| | G-C-G¹ | |
| 4149-8_259 | Bn-Bn-A¹-C-Heg-G-lb-lb-A-C-A¹-C-G-C-G-Bn-Bn-Bn-A-Bn-A¹-G- | 210 |
| | C-G¹ | |
| 4149-8_260 | Bn-Bn-A¹-C-Heg-G-Bn-Bn-A-C-A¹-C-G-C-G-Bn-Pe-Th-A-Bn-A¹- | 211 |
| | G-C-G¹ | |
| 4149-8_261 | Bn-Bn-A¹-C-Heg-G-Bn-Bn-A-C-A¹-C-G-C-G-Bn-Pe-Pe-A-Bn-A¹- | 212 |
| | G-C-G¹ | |
| 4149-8_262 | Bn-Bn-A¹-C-Heg-G-Bn-Bn-A-C-A¹-C-G-C-G-Bn-Th-Th-A-Bn-A¹- | 213 |
| | G-C-G¹ | |
| 4149-8_263 | Bn-Bn-A¹-C-Heg-G-Bn-Bn-A-C-A¹-C-G-C-G-2Nap-Pe-Th-A-Bn- | 214 |
| | A¹-G-C-G¹ | |
| 4149-8_264 | Bn-Bn-A¹-C-Heg-G-Bn-Bn-A-C-A¹-C-G-C-G-Th-Pe-Th-A-Bn-A¹- | 215 |
| | G-C-G¹ | |
| 4149-8_265 | Bn-Bn-A¹-C-Heg-G-Bn-Bn-A-C-A¹-C-G-C-G-lb-Pe-Th-A-Bn-A¹-G- | 216 |
| | C-G¹ | |
| 4149-8_266 | Bn-Bn-A¹-C-Heg-G-Bn-lb-A-C-A¹-C-G-C-G-Th-Pe-Th-A-Bn-A¹-G- | 217 |
| | C-G¹ | |
| 4149-8_267 | Bn-lb-A¹-C-Heg-G-lb-lb-A-C-A¹-C-G-C-G-lb-Bn-Bn-A-Bn-A¹-G-C- | 218 |
| | G¹ | |
| 4149-8_268 | 2Nap-2Nap-A¹-C-Heg-G-2Nap-Bn-A-C-A¹-C-G-C-G-2Nap-Bn- | 219 |
| | Bn-A-Bn-A¹-G-C-G¹ | |
| 4149-8_269 | NE-Bn-A¹-C-Heg-G-NE-Bn-A-C-A¹-C-G-C-G-Bn-Bn-Bn-A-NE-A¹- | 220 |
| | G-C-G¹ | |
| 4149-8_270 | Th-Bn-A¹-C-Heg-G-Bn-Bn-A-C-A¹-C-G-C-G-Th-Bn-Th-A-Bn-A¹- | 221 |
| | G-C-G¹ | |
| 4149-8_271 | Bn-Bn-A¹-C-Heg-G-Bn-Bn-A-C-A¹-C¹-G-C-G-Bn-Bn-Bn-A¹-Bn-A¹- | 222 |
| | G¹-C-G¹ | |
| 4149-8_272 | Bn-Bn-A¹-C-Heg-G-Bn-Bn-A-C-A¹-C-G-C-G-Bn-Bn-Bn-A¹-Bn-A¹- | 223 |
| | G¹-C-G¹ | |
| 4149-8_273 | Bn-Bn-A¹-C-Heg-G-Bn-Bn-A-C-A¹-C¹-G-C-G-Bn-Bn-Bn-A¹-Bn-A¹- | 224 |
| | G-C-G¹ | |
| 4149-8_274 | Bn-Bn-A¹-C-Heg-G-Bn-Bn-A-C-A¹-C¹-G-C-G-Bn-Bn-Bn-A-Bn-A¹- | 225 |
| | G¹-C-G¹ | |
| 4149-8_275 | Bn-Bn-A¹-C-Heg-G-Bn-lb-A-C-A¹-C-G-C-G-2Nap-Pe-Th-A-Bn-A¹- | 226 |
| | G-C-G¹ | |
| 4149-8_279 | Bn-Bn-A¹-C-Heg-G-Bn-lb-A-C-A¹-C¹-G-C-G-Bn-Pe-Th-A-Bn-A¹- | 227 |
| | G-C-G¹ | |
| 4149-8_280 | Bn-Bn-A¹-C-Heg-G-Bn-lb-A-C-A¹-C-G-C-G-Bn-Pe-Th-A¹-Bn-A¹- | 228 |
| | G-C-G¹ | |
| 4149-8_281 | Bn-Bn-A¹-C-Heg-G-Bn-lb-A-C-A¹-C-G-C-G-Bn-Pe-Th-A-Bn-A¹- | 229 |
| | G¹-C-G¹ | |
| 4149-8_282 | Bn-Bn-A¹-C-Heg-G-Bn-lb-A-C-A¹-C¹-G-C-G-Bn-Pe-Th-A¹-Bn-A¹- | 230 |
| | G-C-G¹ | |
| 4149-8_283 | Bn-Bn-A¹-C-Heg-G-Bn-lb-A-C-A¹-C¹-G-C-G-Bn-Pe-Th-A¹-Bn-A¹- | 231 |
| | G¹-C-G¹ | |
| 4149-8_284 | Bn-Bn-A¹-C-Heg-G-Bn-Bn-A-C-A¹-C^{o-G-C-G-Bn-Bn-Bn-A}¹-Bn-A¹- | 232 |
| | G-C-G¹ | |
| 4149-8_285 | Bn-Bn-A¹-C-Heg-G-Bn-Bn-A-C¹-A¹-C¹-G-C-G-Bn-Bn-Bn-A¹-Bn- | 233 |
| | A¹-G-C¹-G¹ | |
| 4149-8_286 | Bn-Bn-A¹-C-Heg-G-Bn-Bn-A-C¹-A¹-C¹-G-C-G-Bn-Bn-Bn-A¹-Bn- | 234 |
| | A¹-G¹-C¹-G¹ | |
| 4149-8_287 | Bn-Bn-A¹-C-Heg-G-Bn-Bn-A-C-C3-C3-G-C-G-Bn-Bn-Bn-A¹-Bn- | 235 |
| | A¹-G-C-G¹ | |
| 4149-8_288 | Bn-Bn-A¹-C-Heg-G-Bn-Bn-A-C-C3--G-C-G-Bn-Bn-Bn-A¹-Bn-A¹- | 236 |
| | G-C-G¹ | |
| 4149-8_289 | Bn-Bn-A¹-C-Heg-G-Bn-Bn-A-C-C3-C¹-G-C-G-Bn-Bn-Bn-A¹-Bn-A¹- | 237 |
| | G-C-G¹ | |
| 4149-8_290 | Bn-Bn-A¹-C-Heg-G-Bn-Bn-A-C-A¹-C3-G-C-G-Bn-Bn-Bn-A¹-Bn- | 238 |
| | A¹-G-C-G¹ | |
| 4149-8_291 | Bn-Bn-A¹-C-Heg-G-Bn-Bn-A-C-Heg-G-C-G-Bn-Bn-Bn-A¹-Bn-A¹- | 239 |
| | G-C-G¹ | |
| 4149-8_292 | Bn-Bn-A-C-G-C-A-C-G-C-G-Bn-Bn-A-C-A-C-G-C-G-Bn-Bn-Bn-A- | 240 |
| | Bn-A-G-C-G | |
| 4149-8_293 | Bn-Bn-A-C-C-A-C-G--G-Bn-Bn-A-C-A-C-G-C-G-Bn-Bn-Bn-A-Bn- | 241 |
| | A-G-C-G | |
| 4149-8_294 | Bn-Bn-A¹-C-Heg-G-Bn-Bn-A-C-T-C-G-C-G-Bn-Bn-Bn-A-Bn-A¹-G- | 242 |
| | C-G¹ | |
| 4149-8_295 | Bn-Bn-A¹-C-Heg-G-Bn-Bn-A-C-C-C-G-C-G-Bn-Bn-Bn-A-Bn-A¹-G- | 243 |
| | C-G¹ | |
| 4149-8_296 | Bn-Bn-A¹-C-Heg-G-Bn-Bn-A-C-G-C-G-C-G-Bn-Bn-Bn-A-Bn-A¹- | 244 |
| | G-C-G¹ | |
| 4149-8_297 | Bn-Bn-A¹-C-Heg-G-Bn-Bn-A-C-A¹-T-G-C-G-Bn-Bn-Bn-A-Bn-A¹- | 245 |
| | G-C-G¹ | |
| 4149-8_298 | Bn-Bn-A¹-C-Heg-G-Bn-Bn-A-C-A¹-A-G-C-G-Bn-Bn-Bn-A-Bn-A¹- | 246 |
| | G-C-G¹ | |
| 4149-8_299 | Bn-Bn-A¹-C-Heg-G-Bn-Bn-A-C-A¹-G-G-C-G-Bn-Bn-Bn-A-Bn-A¹- | 247 |
| | G-C-G¹ | |
| 4149-8_300 | Bn-Bn-A¹-C-Heg-G-Bn-Bn-A-C-T-G-C-G-Bn-Bn-Bn-A-Bn-A¹-G-C- | 248 |
| | G¹ | |
| 4149-8_301 | Bn-Bn-A¹-C-Heg-G-Bn-Bn-A-C-A-G-C-G-Bn-Bn-Bn-A-Bn-A¹-G-C- | 249 |
| | G¹ | |
| 4149-8_302 | Bn-Bn-A¹-C-Heg-G-Bn-Bn-A-C-G-G-C-G-Bn-Bn-Bn-A-Bn-A¹-G- | 250 |
| | C-G¹ | |
| 4149-8_303 | Bn-Bn-A¹-C-Heg-G-Bn-Bn-A-C-C-G-C-G-Bn-Bn-Bn-A-Bn-A¹-G-C- | 251 |
| | G¹ | |
| 4149-8_307 | Bn-Bn-A¹-C-Heg-G-Bn¹-Bn-A-C-A¹-C-G-C-G-Bn-Bn-Bn-A-Bn-A¹- | 252 |
| | G-C-G¹ | |
| 4149-8_308 | Bn-Bn-A¹-C-Heg-G-Bn-Bn¹-A-C-A¹-C-G-C-G-Bn-Bn-Bn-A-Bn-A¹- | 253 |
| | G-C-G¹ | |
| 4149-8_311 | Bn-Bn-A¹-C-Heg-G-Bn-Bn-A-C-A¹-C-G-C-G-Bn-Bn-Bn¹-A-Bn-A¹- | 254 |
| | G-C-G¹ | |
| 4149-8_312 | Bn-Bn-A¹-C-Heg-G-Bn-Bn-A-C-A¹-C-G-C-G-Bn-Bn-Bn-A-Bn¹-A¹- | 255 |
| | G-C-G¹ | |
| 4149-8_321 | Bn-Bn-A¹-C-Heg-G-Bn-Bn-A-C-A¹-C-G-C-G-Bn-Pe-Bn-A-MBn- | 256 |
| | A¹-G-C-G¹ | |
| 4149-8_322 | Bn-Bn-A¹-C-Heg-G-Bn-Bn-A-C-A¹-C-G-C-G-Bn-Pe-Th-A-MBn- | 257 |
| | A¹-G-C-G¹ | |
| 4149-8_323 | Bn-Bn-A¹-C-Heg-G-Bn-Bn-A-C-A¹-C¹-G-C-G-Bn-Pe-Th-A¹-Bn-A¹- | 258 |
| | G-C-G¹ | |
| 4149-8_324 | Bn-Bn-A¹-C-Heg-G-Bn-Bn-A-C-A¹-C¹-G-C-G-Th-Pe-Th-A¹-Bn-A¹- | 259 |
| | G-C-G¹ | |
| 4149-8_325 | Bn-Bn-A¹-C-Heg-G-Bn¹-Bn-A-C-A¹-C¹-G-C-G-Bn-Bn-Bn-A¹-Bn- | 260 |
| | A¹-G-C-G¹ | |
| 4149-8_326 | Bn-Bn-A¹-C-Heg-G-Bn-Bn-A-C-A¹-C¹-G-C-G-Bn-Bn-Bn¹-A¹-Bn- | 261 |
| | A¹-G-C-G¹ | |
| 4149-8_327 | Bn-Bn-A¹-C-Heg-G-Bn¹-Bn-A-C-A¹-C¹-G-C-G-Bn-Bn-Bn¹-A¹-Bn- | 262 |
| | A¹-G-C-G¹ | |
| 4149-8_328 | Bn-Bn-A¹-C-Heg-G-Bn-Bn-A-C-A¹-C¹-G-C-G-Bn-Pe-Bn¹-A¹-Bn-A¹- | 263 |
| | G-C-G¹ | |
| 4149-8_329 | Bn-Bn-A¹-C-Heg-G-Bn-Bn-A-C-A¹-C¹-G-C-G-Bn-Bn-Bn-A¹-MBn- | 264 |
| | A¹-G-C-G¹ | |
| 4149-8_330 | Bn-Bn-A¹-C-Heg-G-Bn-Bn-A-C-A¹-C¹-G-C-G-Bn-Pe-Bn-A¹-MBn- | 265 |
| | A¹-G-C-G¹ | |
| 4149-8_331 | Bn-Bn-A¹-C-Heg-G-Bn-Bn-A-C-A¹-C¹-G-C-G-Bn-Pe-Th-A¹-MBn- | 266 |
| | A¹-G-C-G¹ | |
| 4149-8_332 | Bn-Bn-A¹-C-Heg-G-Bn-Bn-A-C-C3-C¹-G-C-G-Bn-Pe-Bn-A¹-MBn- | 267 |
| | A¹-G-C-G¹ | |
| 4149-8_333 | Bn-Bn-A¹-C-Heg-G-Bn-Bn-A-C-C3-C¹-G-C-G-Bn-Pe-Th-A¹-MBn- | 268 |
| | A¹-G-C-G¹ | |
| 4149-8_334 | Bn-Bn-A¹-C-Heg-G-Bn-Bn-A-C-A¹-C-G-C-G-Bn-Pe-Th-A-Bn-A¹- | 269 |
| | G-C-G¹-Heg-Heg-Bn-Bn-A¹-C-Heg-G-Bn-Bn-A-C-A¹-C-G-C-G-Bn- | |
| | Pe-Th-A-Bn-A¹-G-C-G¹ | |
| 4149-8_335 | Bn-Bn-A¹-C-Heg-G-Bn-Bn-A-C-A¹-C-G-C-G-Bn-Pe-Th-A-Bn-A¹- | 270 |
| | G-C-G¹-Heg-Heg-Heg-Bn-Bn-A¹-C-Heg-G-Bn-Bn-A-C-A¹-C-G-C- | |
| | G-Bn-Pe-Th-A-Bn-A¹-G-C-G¹ | |
| 4149-8_336 | Bn-Bn-A¹-C-Heg-G-Bn-Bn-A-C-A¹-C-G-C-G-Bn-Pe-Th-A-Bn-A¹- | 271 |
| | G-C-G¹-Heg-Heg-Heg-Heg-Bn-Bn-A¹-C-Heg-G-Bn-Bn-A-C-A¹-C- | |
| | G-C-G-Bn-Pe-Th-A-Bn-A¹-G-C-G¹ | |
| 4149-8_337 | Bn-Bn-A¹-C-Heg-G-Bn-Bn-A-C-A¹-C-G-C-G-Bn-Pe-Th-A-Bn-A¹- | 272 |
| | G-C-G¹-Heg-Heg-Heg-Heg-Heg-Bn-Bn-A¹-C-Heg-G-Bn-Bn-A-C- | |
| | A¹-C-G-C-G-Bn-Pe-Th-A-Bn-A¹-G-C-G¹ | |
| 4149-8_338 | Bn-Bn-A¹-C-Heg-G-Bn-Bn-A-C-A¹-C-G-C-G-Bn-Pe-Th-A-Bn-A¹- | 273 |
| | G-C-G¹-Heg-Heg-Heg-Heg-Heg-Heg-Bn-Bn-A¹-C-Heg-G-Bn-Bn- | |
| | A-C-A¹-C-G-C-G-Bn-Pe-Th-A-Bn-A¹-G-C-G¹ | |
| 4149-8_339 | Bn-Bn-A¹-C-Heg-G-Bn-Bn-A-C-A¹-C-G-C-G-Bn-Pe-Th-A-Bn-A¹- | 274 |
| | G-C-G¹-C3-(3′-Doubler)-T | |
| 4149-8_340 | Bn-Bn-A¹-C-Heg-G-Bn-Bn-A-C-A¹-C-G-C-G-Bn-Pe-Th-A-Bn-A¹- | 275 |
| | G-C-G¹-Heg-(3′-Doubler)-T | |
| 4149-8_341 | Bn-Bn-A¹-C-Heg-G-Bn-Bn-A-C-A¹-C-G-C-G-Bn-Pe-Th-A-Bn-A¹- | 276 |
| | G-C-G¹-Heg-Heg-(3′-Doubler)-T | |
| 4149-8_342 | Bn-Bn-A¹-C-Heg-G-Bn-Bn-A-C-A¹-C-G-C-G-Bn-Pe-Th-A-Bn-A¹- | 277 |
| | G-C-G¹-Heg-Heg-Heg-(3′-Doubler)-T | |
| 4149-8_343 | Bn-Bn-A¹-C-Heg-G-Bn¹-Bn-A-C-A¹-C¹-G-C-G-Bn-Pe-Bn¹-A¹-Bn- | 278 |
| | A¹-G-C-G¹ | |
| 4149-8_344 | Bn-Bn-A¹-C-Heg-G^{o-Bn}¹-Bn-A-C-A¹-C¹-G-C-G-Bn-Pe-Bn¹-A¹-Bn- | 279 |
| | A¹-G-C-G¹ | |
| 4149-8_345 | Bn-Bn-A¹-C-Heg-G-Bn¹-Bn-A-C-A¹-C¹-G^{o-C-G-Bn-Pe-Bn}¹-A¹-Bn- | 280 |
| | A¹-G-C-G¹ | |
| 4149-8_346 | Bn-Bn-A¹-C-Heg-G-Bn¹-Bn-A-C-A¹-C¹-G-C-G^{o-Bn-Pe-Bn}¹-A¹-Bn- | 281 |
| | A¹-G-C-G¹ | |
| 4149-8_347 | Bn-Bn-A¹-C-Heg-G-Bn¹-Bn-A-C-A¹-C¹-G-C-G-Bn-Pe-Bn¹-A¹-Bn- | 282 |
| | A¹-G^{o-C-G}¹ | |
| 4149-8_349 | Bn-Bn-A¹-C^{o-Heg-G-Bn}¹-Bn-A-C-A¹-C¹-G-C-G-Bn-Pe-Bn¹-A¹-Bn- | 283 |
| | A¹-G-C-G¹ | |
| 4149-8_352 | Bn-Bn-A¹-C-Heg-G-Bn¹-Bn-A-C-A¹-C¹-G-C-G-Bn-Pe-Bn¹-A¹-Bn- | 284 |
| | A¹-G-C^{o-G}¹ | |
| 4149-8_353 | Bn-Bn-A¹-C-Heg-G-Bn-Bn-A^{o-C-A}¹-C¹-G-C-G-Bn-Pe-Bn¹-A¹-Bn- | 285 |
| | A¹-G-C-G¹ | |
| 4149-8_354 | 2Nap-Bn-A¹-C-Heg-G-Bn-Bn-A-C-A¹-C¹-G-C-G-Bn-Pe-Bn¹-A¹-Bn- | 286 |
| | A¹-G-C-G¹ | |
| 4149-8_355 | FBn-Bn-A¹-C-Heg-G-Bn-Bn-A-C-A¹-C¹-G-C-G-Bn-Pe-Bn¹-A¹-Bn- | 287 |
| | A¹-G-C-G¹ | |
| 4149-8_356 | NE-Bn-A¹-C-Heg-G-Bn-Bn-A-C-A¹-C¹-G-C-G-Bn-Pe-Bn¹-A¹-Bn- | 288 |
| | A¹-G-C-G¹ | |
| 4149-8_357 | 2NE-Bn-A¹-C-Heg-G-Bn-Bn-A-C-A¹-C¹-G-C-G-Bn-Pe-Bn¹-A¹-Bn- | 289 |
| | A¹-G-C-G¹ | |
| 4149-8_358 | PP-Bn-A¹-C-Heg-G-Bn-Bn-A-C-A¹-C¹-G-C-G-Bn-Pe-Bn¹-A¹-Bn-A¹- | 290 |
| | G-C-G¹ | |
| 4149-8_359 | lb-Bn-A¹-C-Heg-G-Bn-Bn-A-C-A¹-C¹-G-C-G-Bn-Pe-Bn¹-A¹-Bn-A¹- | 291 |
| | G-C-G¹ | |
| 4149-8_360 | Bn-MBn-A¹-C-Heg-G-Bn-Bn-A-C-A¹-C¹-G-C-G-Bn-Pe-Bn¹-A¹-Bn- | 292 |
| | A¹-G-C-G¹ | |
| 4149-8_361 | T-Bn-A¹-C-Heg-G-Bn-Bn-A-C-A¹-C-G-C-G-Bn-Bn-Bn-A-Bn-A¹-G- | 293 |
| | C-G¹ | |
| 4149-8_362 | Bn-T-A¹-C-Heg-G-Bn-Bn-A-C-A¹-C-G-C-G-Bn-Bn-Bn-A-Bn-A¹-G- | 294 |
| | C-G¹ | |
| 4149-8_363 | Bn-Bn-A¹-C-Heg-G-T-Bn-A-C-A¹-C-G-C-G-Bn-Bn-Bn-A-Bn-A¹-G- | 295 |
| | C-G¹ | |
| 4149-8_369 | Bn-Bn-A¹-C-Heg-G-Bn-Bn-A²-C-A¹-C¹-G-C-G-Bn-Pe-Bn¹-A¹-Bn- | 296 |
| | A¹-G-C-G¹ | |
| 4149-8_370 | Bn-Bn-A¹-C-Heg-G-Bn¹-Bn-A²-C-A¹-C¹-G-C-G-Bn-Pe-Bn¹-A¹-Bn- | 297 |
| | A¹-G-C-G¹ | |
| 4149-8_371 | Bn-Bn-A¹-C-Heg-G-Bn-Bn-A-C-A¹-C¹-G-C-G²-Bn-Pe-Bn¹-A¹-Bn- | 298 |
| | A¹-G-C-G¹ | |
| 4149-8_372 | Bn-Bn-A¹-C-Heg-G-Bn¹-Bn-A-C-A¹-C¹-G-C-G²-Bn-Pe-Bn¹-A¹-Bn- | 299 |
| | A¹-G-C-G¹ | |
| 4149-8_373 | Bn-Bn-A¹-C-Heg-G-Bn-Bn-A²-C-A¹-C¹-G-C-G²-Bn-Pe-Bn¹-A¹-Bn- | 300 |
| | A¹-G-C-G¹ | |
| 4149-8_374 | Bn-Bn-A¹-C-Heg-G-Bn¹-Bn-A²-C-A¹-C¹-G-C-G²-Bn-Pe-Bn¹-A¹-Bn- | 301 |
| | A¹-G-C-G¹ | |
| 4149-8_375 | FBn-Bn-A¹-C-Heg-G-Bn¹-Bn-A-C-A¹-C¹-G-C-G-Bn-Bn-Bn¹-A¹-Bn- | 302 |
| | A¹-G-C-G¹ | |
| 4149-8_376 | Bn-MBn-A¹-C-Heg-G-Bn¹-Bn-A-C-A¹-C¹-G-C-G-Bn-Bn-Bn¹-A¹-Bn- | 303 |
| | A¹-G-C-G¹ | |
| 4149-8_377 | FBn-MBn-A¹-C-Heg-G-Bn¹-Bn-A-C-A¹-C¹-G-C-G-Bn-Bn-Bn¹-A¹- | 304 |
| | Bn-A¹-G-C-G¹ | |
| 4149-8_378 | FBn-Bn-A¹-C-Heg-G-Bn¹-Bn-A-C-C3-C¹-G-C-G-Bn-Bn-Bn¹-A¹-Bn- | 305 |
| | A¹-G-C-G¹ | |
| 4149-8_379 | Bn-MBn-A¹-C-Heg-G-Bn¹-Bn-A-C-C3-C¹-G-C-G-Bn-Bn-Bn¹-A¹- | 306 |
| | Bn-A¹-G-C-G¹ | |
| 4149-8_380 | FBn-MBn-A¹-C-Heg-G-Bn¹-Bn-A-C-C3-C¹-G-C-G-Bn-Bn-Bn¹-A¹- | 307 |
| | Bn-A¹-G-C-G¹ | |
| 4149-8_381 | FBn-Bn-A¹-C-Heg-G-Bn¹-Bn-A-C-A¹-C¹-G-C-G-Bn-Pe-Bn¹-A¹-Bn- | 308 |
| | A¹-G-C-G¹ | |
| 4149-8_382 | Bn-MBn-A¹-C-Heg-G-Bn¹-Bn-A-C-A¹-C¹-G-C-G-Bn-Pe-Bn¹-A¹-Bn- | 309 |
| | A¹-G-C-G¹ | |
| 4149-8_383 | FBn-MBn-A¹-C-Heg-G-Bn¹-Bn-A-C-A¹-C¹-G-C-G-Bn-Pe-Bn¹-A¹- | 310 |
| | Bn-A¹-G-C-G¹ | |
| 4149-8_384 | FBn-Bn-A¹-C-Heg-G-Bn¹-Bn-A-C-C3-C¹-G-C-G-Bn-Pe-Bn¹-A¹-Bn- | 311 |
| | A¹-G-C-G¹ | |
| 4149-8_385 | Bn-MBn-A¹-C-Heg-G-Bn¹-Bn-A-C-C3-C¹-G-C-G-Bn-Pe-Bn¹-A¹- | 312 |
| | Bn-A¹-G-C-G¹ | |
| 4149-8_386 | FBn-MBn-A¹-C-Heg-G-Bn¹-Bn-A-C-C3-C¹-G-C-G-Bn-Pe-Bn¹-A¹- | 313 |
| | Bn-A¹-G-C-G¹ | |
| 4149-8_388 | Bn-Bn-A¹-C-Heg-G-Bn-Bn-A²-C-A¹-C¹-G-C-G²-Bn-Bn-Bn¹-A¹-Bn- | 314 |
| | A¹-G-C-G¹ | |
| 4149-8_389 | Bn-Bn-A¹-C-Heg-G-Bn¹-Bn-A²-C-A¹-C¹-G-C-G²-Bn-Bn-Bn¹-A¹-Bn- | 315 |
| | A¹-G-C-G¹ | |
| 4149-8_390 | Bn-Bn-A¹-C-Heg-G-Bn¹-Bn-A²-C-C3-C¹-G-C-G²-Bn-Pe-Bn¹-A¹-Bn- | 316 |
| | A¹-G-C-G¹ | |
| 4149-8_391 | Bn-Bn-A¹-C-Heg-G-Bn-Bn-A²-C-C3-C¹-G-C-G²-Bn-Bn-Bn¹-A¹-Bn- | 317 |
| | A¹-G-C-G¹ | |
| 4149-8_392 | Bn-Bn-A¹-C-Heg-G-Bn¹-Bn-A²-C-C3-C¹-G-C-G²-Bn-Bn-Bn¹-A¹- | 318 |
| | Bn-A¹-G-C-G¹ | |
| 4149-8_393 | FBn-Bn-A¹-C-Heg-G-Bn-Bn-A²-C¹-A¹-C-G-C-G²-Bn-Pe-Bn¹-A¹-Bn- | 319 |
| | A¹-G-C-G¹ | |
| 4149-8_394 | Bn-MBn-A¹-C-Heg-G-Bn-Bn-A²-C-A¹-C¹-G-C-G²-Bn-Pe-Bn¹-A¹- | 320 |
| | Bn-A¹-G-C-G¹ | |
| 4149-8_395 | FBn-MBn-A¹-C-Heg-G-Bn-Bn-A²-C-A¹-C¹-G-C-G²-Bn-Pe-Bn¹-A¹- | 321 |
| | Bn-A¹-G-C-G¹ | |
| 4149-8_396 | FBn-Bn-A¹-C-Heg-G-Bn-Bn-A²-C-C3-C¹-G-C-G²-Bn-Pe-Bn¹-A¹- | 322 |
| | Bn-A¹-G-C-G¹ | |
| 4149-8_397 | Bn-MBn-A¹-C-Heg-G-Bn-Bn-A²-C-C3-C¹-G-C-G²-Bn-Pe-Bn¹-A¹- | 323 |
| | Bn-A¹-G-C-G¹ | |
| 4149-8_398 | FBn-MBn-A¹-C-Heg-G-Bn-Bn-A²-C-C3-C¹-G-C-G²-Bn-Pe-Bn¹-A¹- | 324 |
| | Bn-A¹-G-C-G¹ | |
| 4149-8_399 | FBn-MBn-A¹-C-Heg-G-Bn¹-Bn-A²-C-C3-C¹-G-C-G²-Bn-Bn-Bn¹-A¹- | 325 |
| | Bn-A¹-G-C-G¹ | |
| 4149-8_400 | FBn-MBn-A¹-C-Heg-G-Bn¹-Bn-A²-C-A¹-C¹-G-C-G²-Bn-Bn-Bn¹-A¹- | 326 |
| | Bn-A¹-G-C-G¹ | |
| 4149-8_402 | Bn-Bn-A-C-G-A-C-Bn-A-C-G-Bn-Bn-A-C-A-G-C-G--Bn-Bn-Bn-A- | 327 |
| | Bn-A-G-C | |
| 4149-8_403 | Bn-Bn-A-C-Heg-G-Bn-Bn-A-C-A-G-C-G--Bn-Bn-Bn-A-Bn-A-G-C | 328 |
| 4149-8_404 | Bn-Bn-A-C-Heg-G-Bn-Bn-A-C-C3-G-C-G-Bn-Bn-Bn-A-Bn-A-G-C | 329 |
| 4149-8_418 | Bn-MBn-A¹-C-Heg-G-Bn¹-Bn-A-C-C3-C¹-G-C-G¹-Bn-Bn-Bn¹-A¹- | 330 |
| | Bn-A¹-G-C-G¹ | |
| 4149-8_419 | Bn-MBn-A¹-C-Heg-G-Bn¹-Bn-A-C-C3-C¹-G-C-G¹-Nap-Bn-Bn¹-A¹- | 331 |
| | Bn-A¹-G-C-G¹ | |
| 4149-8_420 | Bn-MBn-A¹-C-Heg-G-Bn¹-Bn-A-C-C3-C¹-G-C-G¹-2Nap-Bn-Bn¹- | 332 |
| | A¹-Bn-A¹-G-C-G¹ | |
| 4149-8_421 | Bn-MBn-A¹-C-Heg-G-Bn¹-Bn-A-C-C3-C¹-G¹-C-G-Bn-Bn-Bn¹-A¹- | 333 |
| | Bn-A¹-G-C-G¹ | |
| 4149-8_422 | Bn-MBn-A¹-C-Heg-G-Bn¹-Bn-A-C-C3-C-G¹-C¹-G¹-Bn-Bn-Bn¹-A¹- | 334 |
| | Bn-A¹-G-C-G¹ | |
| 4149-8_423 | Bn-MBn-A¹-C-Heg-G-Bn¹-Bn-A-C-C3-C-G¹-C¹-G-Nap-Bn-Bn¹-A¹- | 335 |
| | Bn-A¹-G-C-G¹ | |
| 4149-8_424 | Bn-MBn-A¹-C-Heg-G-Bn¹-Bn-A-C-C3-C¹-G¹-C¹-G-Bn-Bn-Bn¹-A¹- | 336 |
| | Bn-A¹-G-C-G¹ | |
| 4149-8_425 | Bn-MBn-A¹-C-Heg-G-Bn¹-Bn-A¹-C-C3-C¹-G-C-G-Bn-Bn-Bn¹-A¹- | 337 |
| | Bn-A¹-G-C-G¹ | |
| 4149-8_431 | Bn-MBn-A¹-C-Heg-G-Bn¹-Bn-A²-C-C3-C¹-G-C-G²-Nap-Bn²-Bn¹- | 338 |
| | A¹-Bn-A¹-G-C-G¹ | |
| 4149-8_432 | Bn-MBn-A¹-C-Heg-G-Bn¹-Bn-A²-C-C3-C¹-G-C-G²-Bn-Bn²-Bn¹-A¹- | 339 |
| | Bn-A¹-G-C-G¹ | |
| 4149-8_433 | Bn-MBn-A¹-C-Heg-G-Bn¹-Bn-A²-C-C3-C¹-G-C-G²-Nap-Bn-Bn¹- | 340 |
| | A¹-Bn-A¹-G-C-G¹ | |
| 4149-8_434 | Bn-MBn-A¹-C-Heg-G-Bn¹-Bn-A²-C-C3-C¹-G-C-G²-Bn-Bn-Bn¹-A¹- | 341 |
| | Bn-A¹-G-C-G¹ | |
| 4149-8_435 | Bn-Bn-A¹-C-Heg-G-Bn¹-Bn-A²-C-C3-C¹-G-C-G²-Nap-Bn²-Bn¹-A¹- | 342 |
| | Bn-A¹-G-C-G¹ | |
| 4149-8_436 | Bn-Bn-A¹-C-Heg-G-Bn¹-Bn-A²-C-C3-C¹-G-C-G²-Bn-Bn²-Bn¹-A¹- | 343 |
| | Bn-A¹-G-C-G¹ | |
| 4149-8_437 | Bn-Bn-A¹-C-Heg-G-Bn¹-Bn-A²-C-C3-C¹-G-C-G²-Nap-Bn-Bn¹-A¹- | 344 |
| | Bn-A¹-G-C-G¹ | |
| No superscript indicates deoxyribose | | |
| Superscript o indicates 2′-fluoro | | |
| Superscript 1 indicates 2′-O-methyl | | |
| Superscript 2 indicates phosphorothioate (deoxyribose) | | |
| C3 = three carbon linker | | |
| Heg = hexaethylene glycol linker | | |
| Nap = naphthyl-dU | | |
| Pe = phenethyl-dU | | |
| BT = benzothiophenyl-dU | | |
| Th = thiophenyl-dU | | |
| Ib = isobutyl-dU | | |
| Trp = tryptaminyl-dU | | |
| 2Nap = 2-naphthyl-dU | | |
| 2NE = 2-naphthylethyl-dU | | |
| NE = naphthylethyl-dU | | |
| MBn = methylenedioxybenzyl-dU | | |
| PP = phenpropyl-dU | | |
| Tyr = tyrosyl-dU | | |
| FBn = fluorobenzyl-dU | | |
| Bn = benzyl-dU | | |
| 3′-Doubler = Symmetric Doubler Phosphoramidite (Glen Research, Cat# 10-1920-02) | | |

TABLE 1a
Homodimers of PDGF aptamer 4149-8_260 (SL5):

| | | | SOMAmer (2.5 nM) | |
|---|---|---|---|---|
| | | | PDGF-BB | |
| | | | (1 nM) duplicates | |
| | | Ratio to | Relative PDGFRb | |
| Seql | Kd (M) | 4149-8_38 | phosphorylation | |
| 4149-8_38 | 3.00E−11 | 1.0 | 5.4% | 3.6% |
| 4149-8_334 | 4.92E−11 | 1.6 | 1.7% | 1.7% |
| 4149-8_335 | 5.46E−11 | 1.8 | 1.5% | 1.5% |
| 4149-8_336 | 1.84E−11 | 0.61 | 1.7% | 2.3% |
| 4149-8_337 | 3.79E−12 | 0.1 | | |
| 4149-8_338 | 2.84E−11 | 0.93 | 1.4% | 1.3% |
| 4149-8_339 | 6.20E−12 | 0.2 | 2.7% | 3.6% |
| 3′DBLR | | | | |
| 4149-8_340 | 1.89E−11 | 0.6 | 1.7% | 3.2% |
| 3′DBLR | | | | |
| 4149-8_341 | 2.72E−11 | 0.9 | 1.5% | 1.9% |
| 3′DBLR | | | | |
| 4149-8_342 | 1.81E−11 | 0.6 | 1.6% | 1.5% |
| 3′DBLR | | | | |

TABLE 2
Sequences Representative of the Truncated Variants with K_{d} values for PDGF
of more than 10 nM

| Aptamer ID. No. | Sequence (5′→ 3′) | SEQ ID NO. |
|---|---|---|
| 4149-8_14 | C-G-A-C-Bn-A-C-G-Bn-Bn-A-C-A-C-G-C-G-Bn-Bn-Bn-A-Bn-A-G- | 345 |
| | C-G-Bn-C-A-A-C-C-C-G-A-G-Bn-G-A-A-C-A | |
| 4149-8_15 | A-C-Bn-A-C-G-Bn-Bn-A-C-A-C-G-C-G-Bn-Bn-Bn-A-Bn-A-G-C-G- | 346 |
| | Bn-C-A-A-C-C-C-G-A-G-Bn-G-A-A-C-A | |
| 4149-8_16 | Bn-A-C-G-Bn-Bn-A-C-A-C-G-C-G-Bn-Bn-Bn-A-Bn-A-G-C-G-Bn- | 347 |
| | C-A-A-C-C-C-G-A-G-Bn-G-A-A-C-A | |
| 4149-8_17 | C-G-Bn-Bn-A-C-A-C-G-C-G-Bn-Bn-Bn-A-Bn-A-G-C-G-Bn-C-A-A- | 348 |
| | C-C-C-G-A-G-Bn-G-A-A-C-A | |
| 4149-8_18 | Bn-Bn-A-C-A-C-G-C-G-Bn-Bn-Bn-A-Bn-A-G-C-G-Bn-C-A-A-C-C- | 349 |
| | C-G-A-G-Bn-G-A-A-C-A | |
| 4149-8_19 | A-C-A-C-G-C-G-Bn-Bn-Bn-A-Bn-A-G-C-G-Bn-C-A-A-C-C-C-G-A- | 350 |
| | G-Bn-G-A-A-C-A | |
| 4149-8_33 | C-Bn-Bn-A-C-G-A-C-Bn-A-C-G-Bn-Bn-A-C-A-C-G-C-G-Bn-Bn- | 351 |
| | Bn-A-Bn-A | |
| 4149-8_34 | C-Bn-Bn-A-C-G-A-C-Bn-A-C-G-Bn-Bn-A-C-A-C-G-C-G-Bn-Bn- | 352 |
| | Bn-A-T | |
| 4149-8_35 | C-Bn-Bn-A-C-G-A-C-Bn-A-C-G-Bn-Bn-A-C-A-C-G-C-G-Bn-Bn- | 353 |
| | Bn-A | |
| 4149-8_41 | Bn-Bn-A-C-G-A-C-Bn-A-C-G-Bn-Bn-A-C-A-C-G-C-G-Bn-Bn-Bn- | 354 |
| | A-Bn-A | |
| 4149-8_42 | Bn-Bn-A-C-G-A-C-Bn-A-C-G-Bn-Bn-A-C-A-C-G-C-G-Bn-Bn-Bn- | 355 |
| | A-T | |
| 4149-8_43 | Bn-Bn-A-C-G-A-C-Bn-A-C-G-Bn-Bn-A-C-A-C-G-C-G-Bn-Bn-Bn-A | 356 |
| 4149-8_65 | Bn-C3-A-C-G-A-C-Bn-A-C-G-Bn-Bn-A-C-A-C-G-C-G-Bn-Bn-Bn- | 357 |
| | A-Bn-A-G-C-G | |
| 4149-8_66 | Bn-Bn-C3-C-G-A-C-Bn-A-C-G-Bn-Bn-A-C-A-C-G-C-G-Bn-Bn-Bn- | 358 |
| | A-Bn-A-G-C-G | |
| 4149-8_74 | Bn-Bn-A-C-G-A-C-Bn-A-C-C3-Bn-Bn-A-C-A-C-G-C-G-Bn-Bn-Bn- | 359 |
| | A-Bn-A-G-C-G | |
| 4149-8_75 | Bn-Bn-A-C-G-A-C-Bn-A-C-G-C3-Bn-A-C-A-C-G-C-G-Bn-Bn-Bn- | 360 |
| | A-Bn-A-G-C-G | |
| 4149-8_76 | Bn-Bn-A-C-G-A-C-Bn-A-C-G-Bn-C3-A-C-A-C-G-C-G-Bn-Bn-Bn- | 361 |
| | A-Bn-A-G-C-G | |
| 4149-8_77 | Bn-Bn-A-C-G-A-C-Bn-A-C-G-Bn-Bn-C3-C-A-C-G-C-G-Bn-Bn-Bn- | 362 |
| | A-Bn-A-G-C-G | |
| 4149-8_81 | Bn-Bn-A-C-G-A-C-Bn-A-C-G-Bn-Bn-A-C-A-C-C3-C-G-Bn-Bn-Bn- | 363 |
| | A-Bn-A-G-C-G | |
| 4149-8_82 | Bn-Bn-A-C-G-A-C-Bn-A-C-G-Bn-Bn-A-C-A-C-G-C3-G-Bn-Bn-Bn- | 364 |
| | A-Bn-A-G-C-G | |
| 4149-8_83 | Bn-Bn-A-C-G-A-C-Bn-A-C-G-Bn-Bn-A-C-A-C-G-C-C3-Bn-Bn-Bn- | 365 |
| | A-Bn-A-G-C-G | |
| 4149-8_84 | Bn-Bn-A-C-G-A-C-Bn-A-C-G-Bn-Bn-A-C-A-C-G-C-G-C3-Bn-Bn- | 366 |
| | A-Bn-A-G-C-G | |
| 4149-8_85 | Bn-Bn-A-C-G-A-C-Bn-A-C-G-Bn-Bn-A-C-A-C-G-C-G-Bn-C3-Bn- | 367 |
| | A-Bn-A-G-C-G | |
| 4149-8_86 | Bn-Bn-A-C-G-A-C-Bn-A-C-G-Bn-Bn-A-C-A-C-G-C-G-Bn-Bn-C3- | 368 |
| | A-Bn-A-G-C-G | |
| 4149-8_88 | Bn-Bn-A-C-G-A-C-Bn-A-C-G-Bn-Bn-A-C-A-C-G-C-G-Bn-Bn-Bn- | 369 |
| | A-C3-A-G-C-G | |
| 4149-8_89 | Bn-Bn-A-C-G-A-C-Bn-A-C-G-Bn-Bn-A-C-A-C-G-C-G-Bn-Bn-Bn- | 370 |
| | A-Bn-C3-G-C-G | |
| 4149-8_90 | Bn-Bn-A-C-G-A-C-Bn-A-C-G-Bn-Bn-A-C-A-C-G-C-G-Bn-Bn-Bn- | 371 |
| | A-Bn-A-C3-C-G | |
| 4149-8_102 | Bn-Bn-A¹-C-G-C3-C-C3-C3-C-G-Bn-Bn-A-C-A¹-C-G-C-G-Bn-Bn- | 372 |
| | Bn-A-Bn-A¹-G-C-G¹ | |
| 4149-8_104 | Bn-U¹-A-C-G-A-C-Bn-A-C-G-Bn-Bn-A-C-A-C-G-C-G-Bn-Bn-Bn-A- | 373 |
| | Bn-A-G-C-G | |
| 4149-8_107 | Bn-Bn-A-C-G-A-C-Bn-A-C-G-Bn-U¹-A-C-A-C-G-C-G-Bn-Bn-Bn-A- | 374 |
| | Bn-A-G-C-G | |
| 4149-8_108 | Bn-Bn-A-C-G-A-C-Bn-A-C-G-Bn-Bn-A-C-A-C-G-C-G-U¹-Bn-Bn-A- | 375 |
| | Bn-A-G-C-G | |
| 4149-8_109 | Bn-Bn-A-C-G-A-C-Bn-A-C-G-Bn-Bn-A-C-A-C-G-C-G-Bn-U¹-Bn-A- | 376 |
| | Bn-A-G-C-G | |
| 4149-8_111 | Nap-Bn-A-C-G-A-C-Bn-A-C-G-Bn-Bn-A-C-A-C-G-C-G-Bn-Bn-Bn- | 377 |
| | A-U¹-A-G-C-G | |
| 4149-8_127 | Bn-Nap-A-C-Heg-Heg-G-U¹-Nap-A-C-A-C-G-C-G-Nap-Nap-Bn- | 378 |
| | A-Nap-A-G-C-G | |
| 4149-8_129 | Bn-Nap-A¹-C-Heg-Heg-G-U¹-Nap-A-C-A¹-C-G-C-G-Nap-Nap-Bn- | 379 |
| | A-Nap-A¹-G-C-G¹ | |
| 4149-8_134 | Bn-Bn-A-C-G-Bn-Bn-A-C-A-C-G-C-G-Bn-Bn-Bn-A-Bn-A-G-C-G | 380 |
| 4149-8_178 | Bn-Bn-A¹-C-Heg-G-Bn-Trp-A-C-A¹-C-G-C-G-Bn-Bn-Bn-A-Bn-A¹- | 381 |
| | G-C-G¹ | |
| 4149-8_179 | Bn-Bn-A¹-C-Heg-G-Bn-Bn-A-C-A¹-C-G-C-G-Trp-Bn-Bn-A-Bn-A¹- | 382 |
| | G-C-G¹ | |
| 4149-8_180 | Bn-Bn-A¹-C-Heg-G-Bn-Bn-A-C-A¹-C-G-C-G-Bn-Trp-Bn-A-Bn-A¹- | 383 |
| | G-C-G¹ | |
| 4149-8_186 | Bn-Bn-A¹-C-Heg-G-Bn-2Nap-A-C-A¹-C-G-C-G-Bn-Bn-Bn-A-Bn- | 384 |
| | A¹-G-C-G¹ | |
| 4149-8_196 | Bn-Bn-A¹-C-Heg-G-Bn-Bn-A-C-A¹-C-G-C-G-Bn-2NE-Bn-A-Bn-A¹- | 385 |
| | G-C-G¹ | |
| 4149-8_244 | Bn-Bn-A¹-C-Heg-G-Bn-Bn-A¹-C-A¹-C-G-C-G-Bn-Bn-Bn-A-Bn-A¹- | 386 |
| | G-C-G¹ | |
| 4149-8_250 | Tyr-MBn-A¹-C-Heg-G-FBn-Ib-A-C-A¹-C-G-C-G-2Nap-Pe-Th-A- | 387 |
| | NE-A¹-G-C-G¹ | |
| 4149-8_251 | Tyr-MBn-A¹-C-Heg-G-FBn-Ib-A-C-A¹-C-G-C-G-2Nap-Pe-Th-A¹- | 388 |
| | NE-A¹-G¹-C-G¹ | |
| 4149-8_252 | Trp-Ib-A¹-C-Heg-G-NE-Ib-A-C-A¹-C-G-C-G-Th-Pe-Th-A-MBn-A¹- | 389 |
| | G-C-G¹ | |
| 4149-8_253 | Trp-Ib-A¹-C-Heg-G-NE-Ib-A-C-A¹-C-G-C-G-Th-Pe-Th-A¹-MBn- | 390 |
| | A¹-G¹-C-G¹ | |
| 4149-8_258 | Bn-Bn-A¹-C-Heg-G-1P-Ib-A-C-A¹-C-G-C-G-Bn-Bn-Bn-A-Bn-A¹-G- | 391 |
| | C-G¹ | |
| 4149-8_276 | Bn-Bn-A¹-C-Heg-G-FBn-Ib-A-C-A¹-C-G-C-G-Bn-Pe-Th-A-Bn-A¹- | 392 |
| | G-C-G¹ | |
| 4149-8_277 | Tyr-Bn-A¹-C-Heg-G-Bn-Ib-A-C-A¹-C-G-C-G-Bn-Pe-Th-A-Bn-A¹- | 393 |
| | G-C-G¹ | |
| 4149-8_278 | Tyr-Bn-A¹-C-Heg-G-FBn-Ib-A-C-A¹-C-G-C-G-2Nap-Pe-Th-A-Bn- | 394 |
| | A¹-G-C-G¹ | |
| 4149-8_304 | Bn-Bn-A¹-C-C3-G-Bn-Bn-A-C-C3--G-C-G-Bn-Bn-Bn-A-Bn-A¹-G- | 395 |
| | C-G¹ | |
| 4149-8_305 | Bn¹-Bn-A¹-C-Heg-G-Bn-Bn-A-C-A¹-C-G-C-G-Bn-Bn-Bn-A-Bn-A¹- | 396 |
| | G-C-G¹ | |
| 4149-8_306 | Bn-Bn¹-A¹-C-Heg-G-Bn-Bn-A-C-A¹-C-G-C-G-Bn-Bn-Bn-A-Bn-A¹- | 397 |
| | G-C-G¹ | |
| 4149-8_309 | Bn-Bn-A¹-C-Heg-G-Bn-Bn-A-C-A¹-C-G-C-G-Bn¹-Bn-Bn-A-Bn-A¹- | 398 |
| | G-C-G¹ | |
| 4149-8_310 | Bn-Bn-A¹-C-Heg-G-Bn-Bn-A-C-A¹-C-G-C-G-Bn-Bn¹-Bn-A-Bn-A¹- | 399 |
| | G-C-G¹ | |
| 4149-8_348 | Bn-Bn-A¹-C-Heg-G-Bn¹-Bn-A^{o}-C-A¹-C-G-C-G-Bn-Pe-Bn¹-A¹-Bn- | 400 |
| | A¹-G-C-G¹ | |
| 4149-8_350 | Bn-Bn-A¹-C-Heg-G-Bn¹-Bn-A-C^{o}-A¹-C¹-G-C-G-Bn-Pe-Bn¹-A¹-Bn- | 401 |
| | A¹-G-C-G¹ | |
| 4149-8_351 | Bn-Bn-A¹-C-Heg-G-Bn¹-Bn-A-C-A¹-C¹-G-C^{o}-G-Bn-Pe-Bn¹-A¹-Bn- | 402 |
| | A¹-G-C-G¹ | |
| 4149-8_364 | Bn-Bn-A¹-C-Heg-G-Bn-T-A-C-A¹-C-G-C-G-Bn-Bn-Bn-A-Bn-A¹-G- | 403 |
| | C-G¹ | |
| 4149-8_365 | Bn-Bn-A¹-C-Heg-G-Bn-Bn-A-C-A¹-C-G-C-G-T-Bn-Bn-A-Bn-A¹-G- | 404 |
| | C-G¹ | |
| 4149-8_366 | Bn-Bn-A¹-C-Heg-G-Bn-Bn-A-C-A¹-C-G-C-G-Bn-T-Bn-A-Bn-A¹-G- | 405 |
| | C-G¹ | |
| 4149-8_367 | Bn-Bn-A¹-C-Heg-G-Bn-Bn-A-C-A¹-C-G-C-G-Bn-Bn-T-A-Bn-A¹-G- | 406 |
| | C-G¹ | |
| 4149-8_368 | Bn-Bn-A¹-C-Heg-G-Bn-Bn-A-C-A¹-C-G-C-G-Bn-Bn-Bn-A-T-A¹-G- | 407 |
| | C-G¹ | |
| 4149-8_405 | Bn-Bn-A-C-Heg-G-Bn-Bn-A-C-C3-C-G-Bn-Bn-Bn-A-Bn-A-G | 408 |
| 4149-8_426 | Bn-MBn-A¹-C-Heg-G-Bn¹-Bn-A¹-C-C3-C¹-G-C-G¹-Bn-Bn-Bn¹-A¹- | 409 |
| | Bn-A¹-G-C-G¹ | |

No superscript indicates deoxyribose
Superscript o indicates 2′-fluoro
Superscript 1 indicates 2′-O-methyl
Superscript 2 indicates phosphorothioate (deoxyribose)
C3 = three carbon linker
Heg = hexaethylene glycol linker
Nap = naphthyl-dU
Pe = phenethyl-dU
BT = benzothiophenyl-dU
Th = thiophenyl-dU
Ib = isobutyl-dU
Trp = tryptaminyl-dU
2Nap = 2-naphthyl-dU
2NE = 2-naphthylethyl-dU
NE = naphthylethyl-dU
MBn = methylenedioxybenzyl-dU
PP = phenpropyl-dU
Tyr = tyrosyl-dU
FBn = fluorobenzyl-dU
Bn = benzyl-dU

TABLE 3
Truncations of PDGF aptamer Clone 4149-8_1.

| Aptamer ID. | | | | Seq. ID. |
|---|---|---|---|---|
| No. | Sequence (5′→ 3′) | Length | K_{d} (nM) | NO. |
| 4149-8_2 | A-T-C-T-C-Z-Z-A-C-G-A-C-Z-A-C-G-Z-Z- | 50 | 0.05 | 2 |
| | A-C-A-C-G-C-G-Z-Z-Z-A-Z-A-G-C-G-Z- | | | |
| | C-A-A-C-C-C-G-A-G-Z-G-A-A-C-A | | | |
| 4149-8_5 | A-T-C-T-C-Z-Z-A-C-G-A-C-Z-A-C-G-Z-Z- | 46 | 0.02 | 4 |
| | A-C-A-C-G-C-G-Z-Z-Z-A-Z-A-G-C-G-Z- | | | |
| | C-A-A-C-C-C-G-A-G-Z-G | | | |
| 4149-8_7 | A-T-C-T-C-Z-Z-A-C-G-A-C-Z-A-C-G-Z-Z- | 42 | 0.02 | 6 |
| | A-C-A-C-G-C-G-Z-Z-Z-A-Z-A-G-C-G-Z- | | | |
| | C-A-A-C-C-C-G | | | |
| 4149-8_9 | A-T-C-T-C-Z-Z-A-C-G-A-C-Z-A-C-G-Z-Z- | 38 | 0.03 | 8 |
| | A-C-A-C-G-C-G-Z-Z-Z-A-Z-A-G-C-G-Z- | | | |
| | C-A-A | | | |
| 4149-8_10 | A-T-C-T-C-Z-Z-A-C-G-A-C-Z-A-C-G-Z-Z- | 36 | 0.05 | 9 |
| | A-C-A-C-G-C-G-Z-Z-Z-A-Z-A-G-C-G-Z-C | | | |
| 4149-8_11 | C-T-C-Z-Z-A-C-G-A-C-Z-A-C-G-Z-Z-A- | 48 | 0.03 | 10 |
| | C-A-C-G-C-G-Z-Z-Z-A-Z-A-G-C-G-Z-C- | | | |
| | A-A-C-C-C-G-A-G-Z-G-A-A-C-A | | | |
| 4149-8_12 | C-Z-Z-A-C-G-A-C-Z-A-C-G-Z-Z-A-C-A- | 46 | 0.04 | 11 |
| | C-G-C-G-Z-Z-Z-A-Z-A-G-C-G-Z-C-A-A- | | | |
| | C-C-C-G-A-G-Z-G-A-A-C-A | | | |
| 4149-8_13 | Z-A-C-G-A-C-Z-A-C-G-Z-Z-A-C-A-C-G- | 44 | 0.8 | 12 |
| | C-G-Z-Z-Z-A-Z-A-G-C-G-Z-C-A-A-C-C- | | | |
| | C-G-A-G-Z-G-A-A-C-A | | | |
| 4149-8_14 | C-G-A-C-Z-A-C-G-Z-Z-A-C-A-C-G-C-G- | 42 | 13 | 345 |
| | Z-Z-Z-A-Z-A-G-C-G-Z-C-A-A-C-C-C-G- | | | |
| | A-G-Z-G-A-A-C-A | | | |
| 4149-8_16 | Z-A-C-G-Z-Z-A-C-A-C-G-C-G-Z-Z-Z-A- | 38 | 22 | 347 |
| | Z-A-G-C-G-Z-C-A-A-C-C-C-G-A-G-Z-G- | | | |
| | A-A-C-A | | | |
| 4149-8_18 | Z-Z-A-C-A-C-G-C-G-Z-Z-Z-A-Z-A-G-C | 34 | 13 | 349 |
| | G-Z-C-A-A-C-C-C-G-A-G-Z-G-A-A-C-A | | | |
| 4149-8_19 | A-C-A-C-G-C-G-Z-Z-Z-A-Z-A-G-C-G-Z- | 32 | 74 | 350 |
| | C-A-A-C-C-C-G-A-G-Z-G-A-A-C-A | | | |
| 4149-8_26 | C-Z-Z-A-C-G-A-C-Z-A-C-G-Z-Z-A-C-A- | 39 | 0.08 | 19 |
| | C-G-C-G-Z-Z-Z-A-Z-A-G-C-G-Z-C-A-A- | | | |
| | C-C-C-G-A | | | |
| 4149-8_27 | C-T-C-Z-Z-A-C-G-A-C-Z-A-C-G-Z-Z-A- | 34 | 0.09 | 20 |
| | C-A-C-G-C-G-Z-Z-Z-A-Z-A-G-C-G-Z-C | | | |
| 4149-8_29 | C-Z-Z-A-C-G-A-C-Z-A-C-G-Z-Z-A-C-A- | 31 | 0.07 | 22 |
| | C-G-C-G-Z-Z-Z-A-Z-A-G-C-G-T | | | |
| 4149-8_30 | C-Z-Z-A-C-G-A-C-Z-A-C-G-Z-Z-A-C-A- | 30 | 0.07 | 23 |
| | C-G-C-G-Z-Z-Z-A-Z-A-G-C-G | | | |
| 4149-8_31 | C-Z-Z-A-C-G-A-C-Z-A-C-G-Z-Z-A-C-A- | 29 | 0.30 | 24 |
| | C-G-C-G-Z-Z-Z-A-Z-A-G-C | | | |
| 4149-8_32 | C-Z-Z-A-C-G-A-C-Z-A-C-G-Z-Z-A-C-A- | 28 | 6 | 25 |
| | C-G-C-G-Z-Z-Z-A-Z-A-G | | | |
| 4149-8_33 | C-Z-Z-A-C-G-A-C-Z-A-C-G-Z-Z-A-C-A- | 27 | >1000 | 351 |
| | C-G-C-G-Z-Z-Z-A-Z-A | | | |
| 4149-8_37 | Z-Z-A-C-G-A-C-Z-A-C-G-Z-Z-A-C-A-C- | 30 | 0.04 | 27 |
| | G-C-G-Z-Z-Z-A-Z-A-G-C-G-T | | | |
| 4149-8_38 | Z-Z-A-C-G-A-C-Z-A-C-G-Z-Z-A-C-A-C- | 29 | 0.05 | 28 |
| | G-C-G-Z-Z-Z-A-Z-A-G-C-G | | | |
| 4149-8_39 | Z-Z-A-C-G-A-C-Z-A-C-G-Z-Z-A-C-A-C- | 28 | .11 | 29 |
| | G-C-G-Z-Z-Z-A-Z-A-G-C | | | |
| 4149-8_40 | Z-Z-A-C-G-A-C-Z-A-C-G-Z-Z-A-C-A-C- | 27 | 1.5 | 30 |
| | G-C-G-Z-Z-Z-A-Z-A-G | | | |
| 4149-8_41 | Z-Z-A-C-G-A-C-Z-A-C-G-Z-Z-A-C-A-C- | 26 | >1000 | 354 |
| | G-C-G-Z-Z-Z-A-Z-A | | | |

TABLE 4
Data-collection, refinement and model statistics.

| Ligand | 4149-8_260 | 4149-8_255 |
|---|---|---|
| DATA COLLECTION | | |
| Space group | P4₁2₁2 | P4₁2₁2 |
| Unit-cell parameters: a, | 59.10, 59.10, 167.01 | 59.40, 59.40 168.2 |
| b, c (Å) | | |
| Wavelength (Å) | 0.97918 | 0.97918 |
| Resolution range (Å) | 50.0-2.20 (2.26-2.20) | 50.0-2.30 (2.36-2.30) |
| Unique reflections | 15629 | 13750 |
| Completeness (%) | 96.8 (99.1) | 97.2 (98.4) |
| R_{merge} | 4.0 (57.8) | 6.4 (57.2) |
| Mean I/σ(I) | 25.3 (3.4) | 19.3 (2.6) |
| REFINEMENT | | |
| Resolution range (Å) | 50.0-2.20 (2.26-2.20) | 50.0-2.30 (2.36-2.30) |
| R_{cryst} | 0.225 (0.329) | 0.239 (0.366) |
| R_{free} | 0.262 (0.353) | 0.279 (0.526) |
| R.m.s.d. bonds (Å) | 0.018 | 0.018 |
| R.m.s.d. angles (°) | 1.882 | 2.017 |
| Total atoms | 1382 | 1355 |
| Mean B factor (Å²) | 43.68 | 43.86 |
| Residues in favored | 98.9 | 98.9 |
| region (%) | | |
| Residues in allowed | 100.0 | 100.0 |
| region (%) | | |
| Molprobity score | 1.45 (99^{th}) | 1.41 (99^{th}) |
| (percentile) | | |
| PDB ID | 4HQU | 4HQX |

Values in parenthesis indicate the values for the highest of twenty resolution shells
R_{merge} = ΣₕΣᵢ|Iᵢ(h) − <I(h)>|/ΣₕΣᵢIᵢ(h)
R_{free} = Σₕ||F_{obs}| − |F_{calc}||/Σₕ|F_{obs}|.
The free R factor was calculated using 5% of the reflections omitted from the refinement (The CCP4 suite: programs for protein crystallography, 1994).
*Ligand B-factors are for ligands in the active sites of the protein monomers. Ligands from solvent (PEG, glycerol, etc.) were not included in the calculation.

TABLE 5
Base-pair parameters for the PDGF BB aptamer compared to B-form DNA.

| Parameter | B-DNA | 5′Stem loop | | Miniknot S1 | | Miniknot S2 | |
|---|---|---|---|---|---|---|---|
| Complementary base-pair | | | | | | | |
| parameters | | | | | | | |
| Buckle (deg.) | 0.5_{(6.7)} | −5.67_{(7.90)} | | 0.32_{(22.8)} | | −0.74_{(15.3)} | |
| Propeller (deg.) | −11.4_{(5.3)} | −9.84_{(6.10)} | | 7.43_{(10.4)} | | 2.42_{(7.75)} | |
| Opening (deg.) | 0.60_{(3.1)} | −8.13_{(25.2)} | | 7.86_{(12.5)} | | 0.35_{(0.40)} | |
| Shear (Å) | 0.00_{(0.21)} | 1.12_{(1.42)} | | 1.29_{(2.52)} | | −0.03_{(0.42)} | |
| Stretch (Å) | −0.15_{(0.12)} | −0.38_{(0.66)} | | 1.96_{(3.55)} | | −0.12_{(0.42)} | |
| Stagger (Å) | 0.09_{(0.19)} | 0.04_{(0.61)} | | −0.45_{(0.69)} | | 0.28_{(0.05)} | |
| Base-pair step parameters | | U2, A3/ | A3, C4/ | C10, A9/ | A9, U20/ | C12, G13/ | G13, C14/ |
| | | U7, U8 | G6, U7 | U16, G15 | U17, U16 | C23, G24 | G22, C23 |
| Tilt (deg.) | −0.1_{(2.5)} | −0.80 | −1.45 | −4.65 | −5.83 | −2.39 | 3.86 |
| Roll (deg.) | 0.6_{(5.2)} | 0.34 | 0.55 | 6.12 | −5.64 | 4.19 | 3.94 |
| Twist (deg.) | 36_{(6.8)} | 24.1 | 33.3 | 25.3 | 15.9 | 29 | 33.9 |
| Shift (Å) | −0.02_{(0.45)} | 3.20 | −0.12 | −0.90 | −1.45 | −0.17 | 0.78 |
| Slide (Å) | 0.23_{(0.81)} | 0.25 | −0.24 | 0.27 | −4.49 | 0.21 | −0.4 |
| Rise (Å) | 3.32_{(0.19)} | 2.68 | 3.28 | 2.98 | 3.58 | 2.73 | 3.13 |
| Local helical parameters | | | | | | | |
| Inclination (deg.) | 2.1_{(9.2)} | 0.81 | 0.96 | 13.6 | −18.9 | 8.28 | 6.72 |
| Tip (deg.) | 0.0_{(4.3)} | 1.92 | 2.52 | 10.4 | 19.5 | 4.72 | −6.57 |
| Helical twist (deg.) | 36.5_{(6.6)} | 24.1 | 33.4 | 26.3 | 17.8 | 29.4 | 34.3 |
| x-displacement (Å) | 0.05_{(1.28)} | 0.52 | −0.5 | −0.97 | −9.84 | −0.34 | −1.28 |
| y-displacement (Å) | 0.02_{(0.87)} | −7.89 | −0.03 | 0.81 | −0.12 | −0.09 | −0.73 |
| Helical rise (Å) | 3.29_{(0.21)} | 2.58 | 3.28 | 3.07 | 5.08 | 2.73 | 3.13 |

TABLE 6
Truncations of PDGF aptamer clone 5169-4.

| Aptamer ID. | | | Seq. ID. |
|---|---|---|---|
| No. | Sequence (5′→3′) | K_{d} (nM) | NO. |
| 5169-4_3 | C-T-G-C-C-P-C-G-A-C-A-G-C-A-P-G-P-A-P- | 0.029 | 410 |
| | G-C-A-C-A-P-C-P-A-G-A-G-G-C-P-A-C-C- | | |
| | C-A-G-P-G-A-A-P-G-A-G-G-A | | |
| 5169-4_4 | C-C-P-C-G-A-C-A-G-C-A-P-G-P-A-P-G-C-A- | 0.027 | 411 |
| | C-A-P-C-P-A-G-A-G-G-C-P-A-C-C-C-A-G-P- | | |
| | G-A-A-P-G-A-G-G-A | | |
| 5169-4_5 | C-G-A-C-A-G-C-A-P-G-P-A-P-G-C-A-C-A- | 0.031 | 412 |
| | P-C-P-A-G-A-G-G-C-P-A-C-C-C-A-G-P-G- | | |
| | A-A-P-G-A-G-G-A | | |
| 5169-4_6 | C-A-G-C-A-P-G-P-A-P-G-C-A-C-A-P-C-P-A- | 67 | 413 |
| | G-A-G-G-C-P-A-C-C-C-A-G-P-G-A-A-P-G- | | |
| | A-G-G-A | | |
| 5169-4_7 | C-T-G-C-C-P-C-G-A-C-A-G-C-A-P-G-P-A-P- | 0.014 | 414 |
| | G-C-A-C-A-P-C-P-A-G-A-G-G-C-P-A-C-C- | | |
| | C-A-G-P-G-A-A-P-G-A | | |
| 5169-4_8 | C-T-G-C-C-P-C-G-A-C-A-G-C-A-P-G-P-A-P- | 0.036 | 415 |
| | G-C-A-C-A-P-C-P-A-G-A-G-G-C-P-A-C-C- | | |
| | C-A-G-P-G-A-A | | |
| 5169-4_9 | C-T-G-C-C-P-C-G-A-C-A-G-C-A-P-G-P-A-P- | 0.72 | 416 |
| | G-C-A-C-A-P-C-P-A-G-A-G-G-C-P-A-C-C- | | |
| | C-A-G-P | | |
| 5169-4_10 | C-T-G-C-C-P-C-G-A-C-A-G-C-A-P-G-P-A-P- | 0.63 | 417 |
| | G-C-A-C-A-P-C-P-A-G-A-G-G-C-P-A-C-C-C | | |
| 5169-4_11 | C-T-G-C-C-P-C-G-A-C-A-G-C-A-P-G-P-A-P- | 0.60 | 418 |
| | G-C-A-C-A-P-C-P-A-G-A-G-G-C-P-A | | |
| 5169-4_12 | C-G-A-C-A-G-C-A-P-G-P-A-P-G-C-A-C-A- | 0.064 | 419 |
| | P-C-P-A-G-A-G-G-C-P-A-C-C-C-A-G-P-G- | | |
| | A-A | | |
| 5169-4_13 | G-A-C-A-G-C-A-P-G-P-A-P-G-C-A-C-A-P- | 0.027 | 420 |
| | C-P-A-G-A-G-G-C-P-A-C-C-C-A-G-P-G-A-A | | |
| 5169-4_14 | A-C-A-G-C-A-P-G-P-A-P-G-C-A-C-A-P-C-P- | 0.17 | 421 |
| | A-G-A-G-G-C-P-A-C-C-C-A-G-P-G-A-A | | |
| 5169-4_15 | C-G-A-C-A-G-C-A-P-G-P-A-P-G-C-A-C-A- | 0.019 | 422 |
| | P-C-P-A-G-A-G-G-C-P-A-C-C-C-A-G-P-G-A | | |
| 5169-4_16 | C-G-A-C-A-G-C-A-P-G-P-A-P-G-C-A-C-A- | 0.016 | 423 |
| | P-C-P-A-G-A-G-G-C-P-A-C-C-C-A-G-P-G | | |
| 5169-4_17 | C-G-A-C-A-G-C-A-P-G-P-A-P-G-C-A-C-A- | 0.020 | 424 |
| | P-C-P-A-G-A-G-G-C-P-A-C-C-C-A-G-P | | |
| 5169-4_18 | C-G-A-C-A-G-C-A-P-G-P-A-P-G-C-A-C-A- | 0.026 | 425 |
| | P-C-P-A-G-A-G-G-C-P-A | | |
| 5169-4_19 | C-G-A-C-A-G-C-A-P-G-P-A-P-G-C-A-C-A- | 0.012 | 426 |
| | P-C-P-A-G-A-G-G-C-P | | |
| 5169-4_20 | C-G-A-C-A-G-C-A-P-G-P-A-P-G-C-A-C-A- | 0.014 | 427 |
| | P-C-P-A-G-A-G-G-C | | |
| 5169-4_21 | C-G-A-C-A-G-C-A-P-G-P-A-P-G-C-A-C-A- | 0.021 | 428 |
| | P-C-P-A-G-A-G-G | | |
| 5169-4_22 | C-G-A-C-A-G-C-A-P-G-P-A-P-G-C-A-C-A- | 0.015 | 429 |
| | P-C-P-A-G-A-G | | |
| 5169-4_23 | C-G-A-C-A-G-C-A-P-G-P-A-P-G-C-A-C-A- | 0.020 | 430 |
| | P-C-P-A-G-A | | |
| 5169-4_24 | C-G-A-C-A-G-C-A-P-G-P-A-P-G-C-A-C-A- | 0.021 | 431 |
| | P-C-P-A-G | | |
| 5169-4_25 | C-G-A-C-A-G-C-A-P-G-P-A-P-G-C-A-C-A- | 0.020 | 432 |
| | P-C-P-A | | |
| 5169-4_26 | C-G-A-C-A-G-C-A-P-G-P-A-P-G-C-A-C-A- | 0.017 | 433 |
| | P-C-P | | |
| 5169-4_27 | G-A-C-A-G-C-A-P-G-P-A-P-G-C-A-C-A-P- | 0.062 | 434 |
| | C-P-A-G-A | | |
| 5169-4_28 | G-A-C-A-G-C-A-P-G-P-A-P-G-C-A-C-A-P- | 0.048 | 435 |
| | C-P-A-G | | |
| 5169-4_29 | G-A-C-A-G-C-A-P-G-P-A-P-G-C-A-C-A-P- | 0.062 | 436 |
| | C-P-A | | |
| 5169-4_30 | G-A-C-A-G-C-A-P-G-P-A-P-G-C-A-C-A-P- | 0.062 | 437 |
| | C-P | | |
| 5169-4_32 | G-A-C-A-G-C-A-P-G-P-A-P-G-C-A-C-A-P- | 0.053 | 438 |
| | C-P-A-G-A-G | | |

TABLE 7
C3 spacer substitutions at all positions in 5169-4_26.

| Aptamer ID. | | | Seq. ID. |
|---|---|---|---|
| No. | Sequence (5′→3′) | K_{d} (nM) | NO. |
| 5169-4_59 | C3-G-A-C-A-G-C-A-P-G-P-A-P-G-C-A-C-A- | 0.053 | 439 |
| | P-C-P | | |
| 5169-4_60 | C-C3-A-C-A-G-C-A-P-G-P-A-P-G-C-A-C-A- | 27 | 440 |
| | P-C-P | | |
| 5169-4_61 | C-G-C3-C-A-G-C-A-P-G-P-A-P-G-C-A-C-A- | NB | 441 |
| | P-C-P | | |
| 5169-4_62 | C-G-A-C3-A-G-C-A-P-G-P-A-P-G-C-A-C-A- | 42 | 442 |
| | P-C-P | | |
| 5169-4_63 | C-G-A-C-C3-G-C-A-P-G-P-A-P-G-C-A-C-A- | 29 | 443 |
| | P-C-P | | |
| 5169-4_64 | C-G-A-C-A-C3-C-A-P-G-P-A-P-G-C-A-C-A- | 0.054 | 444 |
| | P-C-P | | |
| 5169-4_65 | C-G-A-C-A-G-C3-A-P-G-P-A-P-G-C-A-C-A- | 0.074 | 445 |
| | P-C-P | | |
| 5169-4_66 | C-G-A-C-A-G-C-C3-P-G-P-A-P-G-C-A-C-A- | 8.5 | 446 |
| | P-C-P | | |
| 5169-4_67 | C-G-A-C-A-G-C-A-C3-G-P-A-P-G-C-A-C-A- | NB | 447 |
| | P-C-P | | |
| 5169-4_68 | C-G-A-C-A-G-C-A-P-C3-P-A-P-G-C-A-C-A- | NB | 448 |
| | P-C-P | | |
| 5169-4_69 | C-G-A-C-A-G-C-A-P-G-C3-A-P-G-C-A-C-A- | NB | 449 |
| | P-C-P | | |
| 5169-4_70 | C-G-A-C-A-G-C-A-P-G-P-C3-P-G-C-A-C-A- | NB | 450 |
| | P-C-P | | |
| 5169-4_71 | C-G-A-C-A-G-C-A-P-G-P-A-C3-G-C-A-C-A- | NB | 451 |
| | P-C-P | | |
| 5169-4_72 | C-G-A-C-A-G-C-A-P-G-P-A-P-C3-C-A-C-A- | 230 | 452 |
| | P-C-P | | |
| 5169-4_73 | C-G-A-C-A-G-C-A-P-G-P-A-P-G-C3-A-C-A- | 0.015 | 453 |
| | P-C-P | | |
| 5169-4_74 | C-G-A-C-A-G-C-A-P-G-P-A-P-G-C-C3-C-A- | 0.37 | 454 |
| | P-C-P | | |
| 5169-4_75 | C-G-A-C-A-G-C-A-P-G-P-A-P-G-C-A-C3-A- | 0.14 | 455 |
| | P-C-P | | |
| 5169-4_76 | C-G-A-C-A-G-C-A-P-G-P-A-P-G-C-A-C-C3- | 1.3 | 456 |
| | P-C-P | | |
| 5169-4_77 | C-G-A-C-A-G-C-A-P-G-P-A-P-G-C-A-C-A- | NB | 457 |
| | C3-C-P | | |
| 5169-4_78 | C-G-A-C-A-G-C-A-P-G-P-A-P-G-C-A-C-A- | 0.28 | 458 |
| | P-C3-P | | |
| 5169-4_79 | C-G-A-C-A-G-C-A-P-G-P-A-P-G-C-A-C-A- | NB | 459 |
| | P-C-C3 | | |

TABLE 8
2′O-methyl and deoxythymidine substitutions in 5169-4_26.

| Aptamer ID. | | | Seq. ID. |
|---|---|---|---|
| No. | Sequence (5′→3′) | K_{d} (nM) | NO. |
| 5169-4_33 | C¹-G-A-C-A-G-C-A-P-G-P-A-P-G-C-A-C-A- | 0.027 | 460 |
| | P-C-P | | |
| 5169-4_34 | C-G-A-C¹-A-G-C-A-P-G-P-A-P-G-C-A-C-A- | 0.033 | 461 |
| | P-C-P | | |
| 5169-4_35 | C-G-A-C-A-G-C¹-A-P-G-P-A-P-G-C-A-C-A- | 0.016 | 462 |
| | P-C-P | | |
| 5169-4_36 | C-G-A-C-A-G-C-A-P-G-P-A-P-G-C¹-A-C-A- | 0.028 | 463 |
| | P-C-P | | |
| 5169-4_37 | C-G-A-C-A-G-C-A-P-G-P-A-P-G-C-A-C¹-A- | 0.041 | 464 |
| | P-C-P | | |
| 5169-4_38 | C-G-A-C-A-G-C-A-P-G-P-A-P-G-C-A-C-A- | 0.022 | 465 |
| | P-C¹-P | | |
| 5169-4_39 | C-G¹-A-C-A-G-C-A-P-G-P-A-P-G-C-A-C-A- | 0.058 | 466 |
| | P-C-P | | |
| 5169-4_40 | C-G-A-C-A-G¹-C-A-P-G-P-A-P-G-C-A-C-A- | 0.024 | 467 |
| | P-C-P | | |
| 5169-4_41 | C-G-A-C-A-G-C-A-P-G¹-P-A-P-G-C-A-C-A- | 0.097 | 468 |
| | P-C-P | | |
| 5169-4_42 | C-G-A-C-A-G-C-A-P-G-P-A-P-G¹-C-A-C-A- | 0.0069 | 469 |
| | P-C-P | | |
| 5169-4_43 | C-G-A¹-C-A-G-C-A-P-G-P-A-P-G-C-A-C-A- | 0.16 | 470 |
| | P-C-P | | |
| 5169-4_44 | C-G-A-C-A¹-G-C-A-P-G-P-A-P-G-C-A-C-A- | 0.53 | 471 |
| | P-C-P | | |
| 5169-4_45 | C-G-A-C-A-G-C-A¹-P-G-P-A-P-G-C-A-C-A- | 0.93 | 472 |
| | P-C-P | | |
| 5169-4_46 | C-G-A-C-A-G-C-A-P-G-P-A¹-P-G-C-A-C-A- | 0.093 | 473 |
| | P-C-P | | |
| 5169-4_47 | C-G-A-C-A-G-C-A-P-G-P-A-P-G-C-A¹-C-A- | 0.016 | 474 |
| | P-C-P | | |
| 5169-4_48 | C-G-A-C-A-G-C-A-P-G-P-A-P-G-C-A-C-A¹- | 0.014 | 475 |
| | P-C-P | | |
| 5169-4_49 | C-G-A-C-A-G-C-A-P¹-G-P-A-P-G-C-A-C-A- | 0.53 | 476 |
| | P-C-P | | |
| 5169-4_50 | C-G-A-C-A-G-C-A-P-G-P¹-A-P-G-C-A-C-A- | 0.047 | 477 |
| | P-C-P | | |
| 5169-4_51 | C-G-A-C-A-G-C-A-P-G-P-A-P¹-G-C-A-C-A- | 0.32 | 478 |
| | P-C-P | | |
| 5169-4_52 | C-G-A-C-A-G-C-A-P-G-P-A-P-G-C-A-C-A- | 0.31 | 479 |
| | P¹-C-P | | |
| 5169-4_53 | C-G-A-C-A-G-C-A-P-G-P-A-P-G-C-A-C-A- | 0.022 | 480 |
| | P-C-P¹ | | |
| 5169-4_54 | C-G-A-C-A-G-C-A-T-G-P-A-P-G-C-A-C-A- | 44 | 481 |
| | P-C-P | | |
| 5169-4_55 | C-G-A-C-A-G-C-A-P-G-T-A-P-G-C-A-C-A- | 7.8 | 482 |
| | P-C-P | | |
| 5169-4_56 | C-G-A-C-A-G-C-A-P-G-P-A-T-G-C-A-C-A- | NB | 483 |
| | P-C-P | | |
| 5169-4_57 | C-G-A-C-A-G-C-A-P-G-P-A-P-G-C-A-C-A- | 120 | 484 |
| | T-C-P | | |
| 5169-4_58 | C-G-A-C-A-G-C-A-P-G-P-A-P-G-C-A-C-A | NB | 485 |
| | P-C-T | | |

TABLE 9
Multiple 2′-O-methyl substitutions in PDGF aptamer 5169-4_26.

| Aptamer ID. | | | Seq. ID. |
|---|---|---|---|
| No. | Sequence (5′→3′) | K_{d} (nM) | NO. |
| 5169-4_80 | C-G-A-C-A-G-C¹-A-P-G-P-A-P-G-C-A¹-C- | 0.0061 | 486 |
| | A¹-P-C-P | | |
| 5169-4_81 | C-G-A-C-A-G-C¹-A-P-G-P-A-P-G¹-C-A¹-C- | 0.0049 | 487 |
| | A¹-P-C-P | | |
| 5169-4_82 | C-G-A-C-A-G¹-C¹-A-P-G-P-A-P-G¹-C-A¹-C- | 0.0016 | 488 |
| | A¹-P-C¹-P¹ | | |
| 5169-4_83 | C¹-G-A-C-A-G¹-C¹-A-P-G-P-A-P-G¹-C¹-A¹- | 0.0021 | 489 |
| | C-A¹-P-C¹-P¹ | | |
| 5169-4_84 | C¹-G-A-C¹-A-G¹-C¹-A-P-G-P-A-P-G¹-C¹-A¹- | 0.0053 | 490 |
| | C-A¹-P-C¹-P¹ | | |
| 5169-4_85 | C¹-G-A-C¹-A-G¹-C¹-A-P-G-P¹-A-P-G¹-C¹-A¹- | 0.0062 | 491 |
| | C¹-A¹-P-C¹-P¹ | | |
| 5169-4_86 | C¹-G¹-A-C¹-A-G¹-C¹-A-P-G-P¹-A-P-G¹-C¹- | 0.064 | 492 |
| | A¹-C¹-A¹-P-C¹-P¹ | | |
| 5169-4_87 | C¹-G¹-A-C¹-A-G¹-C¹-A-P-G¹-P¹-A¹-P-G¹-C¹- | NB | 493 |
| | A¹-C¹-A¹-P-C¹-P¹ | | |
| 5169-4_88 | C¹-G¹-A¹-C¹-A-G¹-C¹-A-P-G¹-P¹-A¹-P-G¹-C¹- | NB | 494 |
| | A¹-C¹-A¹-P-C¹-P¹ | | |
| 5169-4_89 | C¹-G¹-A¹-C¹-A-G¹-C¹-A-P-G¹-P¹-A¹-P¹-G¹- | NB | 495 |
| | C¹-A¹-C¹-A¹-P¹-C¹-P¹ | | |
| 5169-4_90 | C¹-G¹-A¹-C¹-A¹-G¹-C¹-A-P¹-G¹-P¹-A¹-P¹-G¹- | NB | 496 |
| | C¹-A¹-C¹-A¹-P¹-C¹-P¹ | | |
| 5169-4_91 | C¹-G¹-A¹-C¹-A¹-G¹-C¹-A¹-P¹-G¹-P¹-A¹-P¹-G¹- | NB | 497 |
| | C¹-A¹-C¹-A¹-P¹-C¹-P¹ | | |
| 5169-4_92 | C¹-G-A-C-A-G-C¹-A-P-G-P-A-P-G-C¹-A¹-C- | 0.0052 | 498 |
| | A¹-P-C¹-P¹ | | |
| 5169-4_105 | C-G-A-C-A-G¹-C-A-P-G-P-A-P-G-C-A-C-A¹- | 0.0061 | 499 |
| | P-C¹-P | | |
| 5169-4_106 | C¹-G-A-C-A-G-C-A-P-G-P-A-P-G-C-A-C-A¹- | 0.016 | 517 |
| | P-C¹-P | | |
| 5169-4_107 | C¹-G-A-C-A-G¹-C-A-P-G-P-A-P-G-C-A-C- | 0.013 | 518 |
| | A¹-P-C-P | | |
| 5169-4_108 | C¹-G-A-C-A-G¹-C-A-P-G-P-A-P-G¹-C-A-C- | 0.012 | 519 |
| | A-P-C-P | | |
| 5169-4_109 | C¹-G-A-C-A-G¹-C-A-P-G-P-A-P-G-C-A¹-C- | 0.011 | 520 |
| | A-P-C-P | | |
| 5169-4_110 | C¹-G-A-C-A-G-C-A-P-G-P-A-P-G¹-C-A¹-C- | 0.0050 | 521 |
| | A-P-C-P | | |
| 5169-4_111 | C-G-A-C-A-G-C¹-A-P-G-P-A-P-G¹-C-A¹-C- | 0.0048 | 522 |
| | A-P-C-P | | |
| 5169-4_112 | C-G-A-C-A-G-C-A-P-G-P-A-P-G¹-C-A¹-C-A- | 0.0062 | 523 |
| | P-C-P¹ | | |
| 5169-4_113 | C-G-A-C-A-G-C¹-A-P-G-P-A-P-G-C-A¹-C-A- | 0.012 | 524 |
| | P-C-P¹ | | |
| 5169-4_114 | C-G-A-C-A-G-C¹-A-P-G-P-A-P-G-C-A-C¹-A- | 0.038 | 525 |
| | P-C-P¹ | | |
| 5169-4_115 | C-G-A-C¹-A-G-C¹-A-P-G-P-A-P-G-C-A-C-A- | 0.024 | 526 |
| | P-C-P¹ | | |
| 5169-4_116 | C-G-A-C¹-A-G-C-A-P-G-P-A-P-G-C-A-C¹-A- | 0.093 | 527 |
| | P-C-P¹ | | |
| 5169-4_117 | C-G-A-C¹-A-G-C-A-P-G-P-A¹-P-G-C-A-C¹- | 0.71 | 528 |
| | A-P-C-P | | |
| 5169-4_118 | C-G¹-A-C¹-A-G-C-A-P-G-P-A-P-G-C-A-C¹- | 0.56 | 529 |
| | A-P-C-P | | |
| 5169-4_119 | C-G¹-A-C¹-A-G-C-A-P-G-P-A-P-G-C-A-C¹- | NB | 530 |
| | A-P-C-P | | |
| 5169-4_120 | C-G¹-A-C-A-G-C-A-P-G-P-A¹-P-G-C¹-A-C- | NB | 531 |
| | A-P-C-P | | |
| 5169-4_121 | C-G¹-A-C-A-G-C-A-P-G¹-P-A¹-P-G-C-A-C- | NB | 532 |
| | A-P-C-P | | |
| 5169-4_122 | C-G¹-A-C-A-G-C-A-P-G¹-P-A-P-G-C¹-A-C- | NB | 533 |
| | A-P-C-P | | |
| 5169-4_123 | C¹-G-A-C-A-G-C-A-P-G-P-A-P-G-C-A-C-A- | 0.030 | 534 |
| | P-C¹-P¹ | | |
| 5169-4_124 | C-G-A-C-A¹-G-C-A-P-G-P-A-P-G-C-A-C-A- | 0.60 | 535 |
| | P-C¹-P¹ | | |
| 5169-4_125 | C¹-G-A-C-A¹-G-C-A-P-G-P-A-P-G-C-A-C-A- | 1.0 | 536 |
| | P-C¹-P | | |
| 5169-4_126 | C-G-A-C-A-G-C-A-P-G-P-A-P-G-C-A-C-A- | NB | 537 |
| | P¹-C¹-P¹ | | |
| 5169-4_127 | C-G-A-C-A-G-C-A-P-G-P-A-P-G-C-A¹-C¹- | 0.010 | 538 |
| | A¹-P-C-P | | |
| 5169-4_128 | C-G-A-C-A-G-C-A-P-G-P-A-P¹-G¹-C¹-A-C- | 0.099 | 539 |
| | A-P-C-P | | |
| 5169-4_129 | C-G-A-C-A-G-C-A-P-G¹-P¹-A¹-P-G-C-A-C- | NB | 540 |
| | A-P-C-P | | |
| 5169-4_130 | C-G-A-C-A-G-C¹-A¹-P¹-G-P-A-P-G-C-A-C- | 4.5 | 541 |
| | A-P-C-P | | |
| 5169-4_131 | C-G-A-C¹-A¹-G¹-C-A-P-G-P-A-P-G-C-A-C- | 0.64 | 542 |
| | A-P-C-P | | |
| 5169-4_132 | C¹-G¹-A¹-C-A-G-C-A-P-G-P-A-P-G-C-A-C- | 0.42 | 543 |
| | A-P-C-P | | |
| 5169-4_144 | C¹-G-A-C-A-G-C¹-A-P-G-P-A-P-G¹-C-A¹-C- | 0.00050 | 544 |
| | A¹-P-C-P¹ | | |
| 5169-4_146 | C¹-G-A-C¹-A-G¹-C¹-A-P-G-P-A-P-G¹-C¹-A¹- | 0.00060 | 545 |
| | C¹-A¹-P-C¹-P¹ | | |

TABLE 10
Truncations of VEGF aptamer Clone 4867-31.

| Aptamer ID. | | | K_{d} (nM) | K_{d} (nM) | K_{d} (nM) | Seq. ID. |
|---|---|---|---|---|---|---|
| No. | length | Sequence (5′→ 3′) | hVEGF165 | rVEGF164 | hVEGF121 | NO. |
| OH-4867-31_22 | 38 | T-C-A-A-P-C-A-G-C-C-G-P-P-C- | 0.26 | 0.54 | 0.82 | 546 |
| | | A-A-G-P-G-C-P-P-G-P-A-G-G-A- | | | | |
| | | P-P-P-A-A-A-P-G-G-A | | | | |
| OH-4867-31_23 | 37 | T-C-A-A-P-C-A-G-C-C-G-P-P-C- | 0.30 | 0.66 | 1.3 | 547 |
| | | A-A-G-P-G-C-P-P-G-P-A-G-G-A- | | | | |
| | | P-P-P-A-A-A-P-G-G | | | | |
| OH-4867-31_24 | 36 | T-C-A-A-P-C-A-G-C-C-G-P-P-C- | 2.8 | 4.2 | 36 | 548 |
| | | A-A-G-P-G-C-P-P-G-P-A-G-G-A- | | | | |
| | | P-P-P-A-A-A-P-G | | | | |
| OH-4867-31_25 | 35 | T-C-A-A-P-C-A-G-C-C-G-P-P-C- | 26 | 16 | 70 | 549 |
| | | A-A-G-P-G-C-P-P-G-P-A-G-G-A- | | | | |
| | | P-P-P-A-A-A-P | | | | |
| OH-4867-31-26 | 39 | C-A-A-P-C-A-G-C-C-G-P-P-C-A- | 0.075 | 0.07 | 0.49 | 550 |
| | | A-G-P-G-C-P-P-G-P-A-G-G-A-P- | | | | |
| | | P-P-A-A-A-P-G-G-A-A-P | | | | |
| OH-4867-31-27 | 38 | A-A-P-C-A-G-C-C-G-P-P-C-A-A- | 0.11 | 0.07 | 0.59 | 551 |
| | | G-P-G-C-P-P-G-P-A-G-G-A-P-P- | | | | |
| | | P-A-A-A-P-G-G-A-A-P | | | | |
| OH-4867-31-28 | 37 | A-P-C-A-G-C-C-G-P-P-C-A-A-G- | 0.10 | 0.07 | 0.97 | 552 |
| | | P-G-C-P-P-G-P-A-G-G-A-P-P-P- | | | | |
| | | A-A-A-P-G-G-A-A-P | | | | |
| OH-4867-31-29 | 36 | P-C-A-G-C-C-G-P-P-C-A-A-G-P- | 0.13 | 0.08 | 0.96 | 553 |
| | | G-C-P-P-G-P-A-G-G-A-P-P-P-A- | | | | |
| | | A-A-P-G-G-A-A-P | | | | |
| OH-4867-31-30 | 35 | C-A-G-C-C-G-P-P-C-A-A-G-P-G- | 0.20 | 0.15 | 1.4 | 554 |
| | | C-P-P-G-P-A-G-G-A-P-P-P-A-A- | | | | |
| | | A-P-G-G-A-A-P | | | | |
| OH-4867-31-31 | 34 | A-G-C-C-G-P-P-C-A-A-G-P-G-C- | 0.17 | 0.12 | 1.0 | 555 |
| | | P-P-G-P-A-G-G-A-P-P-P-A-A-A- | | | | |
| | | P-G-G-A-A-P | | | | |
| OH-4867-31-32 | 38 | C-A-A-P-C-A-G-C-C-G-P-P-C-A- | 0.10 | 0.06 | 0.51 | 556 |
| | | A-G-P-G-C-P-P-G-P-A-G-G-A-P- | | | | |
| | | P-P-A-A-A-P-G-G-A-A | | | | |
| OH-4867-31-33 | 37 | A-A-P-C-A-G-C-C-G-P-P-C-A-A- | 0.11 | 0.04 | 0.55 | 557 |
| | | G-P-G-C-P-P-G-P-A-G-G-A-P-P- | | | | |
| | | P-A-A-A-P-G-G-A-A | | | | |
| OH-4867-31-34 | 36 | A-P-C-A-G-C-C-G-P-P-C-A-A-G- | 0.35 | 0.05 | 0.47 | 558 |
| | | P-G-C-P-P-G-P-A-G-G-A-P-P-P- | | | | |
| | | A-A-A-P-G-G-A-A | | | | |
| OH-4867-31-35 | 35 | P-C-A-G-C-C-G-P-P-C-A-A-G-P- | 0.11 | 0.05 | flat | 559 |
| | | G-C-P-P-G-P-A-G-G-A-P-P-P-A- | | | | |
| | | A-P-G-G-A-A | | | | |
| OH-4867-31-36 | 34 | C-A-G-C-C-G-P-P-C-A-A-G-P-G- | 0.11 | 0.06 | 0.39 | 560 |
| | | C-P-P-G-P-A-G-G-A-P-P-P-A-A- | | | | |
| | | A-P-G-G-A-A | | | | |
| OH-4867-31-37 | 33 | A-G-C-C-G-P-P-C-A-A-G-P-G-C- | 0.092 | 0.04 | 0.21 | 561 |
| | | P-P-G-P-A-G-G-A-P-P-P-A-A-A- | | | | |
| | | P-G-G-A-A | | | | |
| OH-4867-31-38 | 37 | C-A-A-P-C-A-G-C-C-G-P-P-C-A- | 0.17 | 0.09 | 0.81 | 562 |
| | | A-G-P-G-C-P-P-G-P-A-G-G-A-P- | | | | |
| | | P-P-A-A-A-P-G-G-A | | | | |
| OH-4867-31-39 | 36 | A-A-P-C-A-G-C-C-G-P-P-C-A-A- | 0.20 | 0.09 | 0.62 | 563 |
| | | G-P-G-C-P-P-G-P-A-G-G-A-P-P- | | | | |
| | | P-A-A-A-P-G-G-A | | | | |
| OH-4867-31-40 | 35 | A-P-C-A-G-C-C-G-P-P-C-A-A-G- | 0.14 | 0.10 | 0.70 | 564 |
| | | P-G-C-P-P-G-P-A-G-G-A-P-P-P- | | | | |
| | | A-A-A-P-G-G-A | | | | |
| OH-4867-31-41 | 34 | P-C-A-G-C-C-G-P-P-C-A-A-G-P- | 0.13 | 0.08 | 0.63 | 565 |
| | | G-C-P-P-G-P-A-G-G-A-P-P-P-A- | | | | |
| | | A-A-P-G-G-A | | | | |
| OH-4867-31-42 | 33 | C-A-G-C-C-G-P-P-C-A-A-G-P-G- | 0.071 | 0.05 | 0.20 | 566 |
| | | C-P-P-G-P-A-G-G-A-P-P-P-A-A- | | | | |
| | | A-P-G-G-A | | | | |
| OH-4867-31-43 | 32 | A-G-C-C-G-P-P-C-A-A-G-P-G-C- | 0.050 | 0.05 | 0.29 | 567 |
| | | P-P-G-P-A-G-G-A-P-P-P-A-A-A- | | | | |
| | | P-G-G-A | | | | |
| OH-4867-31-44 | 32 | C-A-G-C-C-G-P-P-C-A-A-G-P-G- | 0.13 | 0.38 | 0.14 | 568 |
| | | C-P-P-G-P-A-G-G-A-P-P-P-A-A- | | | | |
| | | A-P-G-G | | | | |
| OH-4867-31-45 | 31 | C-A-G-C-C-G-P-P-C-A-A-G-P-G- | 1.1 | 4.5 | 3.3 | 569 |
| | | C-P-P-G-P-A-G-G-A-P-P-P-A-A- | | | | |
| | | A-P-G | | | | |
| OH-4867-31-46 | 30 | C-A-G-C-C-G-P-P-C-A-A-G-P-G- | 5.9 | 9.6 | NB | 570 |
| | | C-P-P-G-P-A-G-G-A-P-P-P-A-A- | | | | |
| | | A-P | | | | |
| OH-4867-31-47 | 29 | C-A-G-C-C-G-P-P-C-A-A-G-P-G- | NB | 83 | NB | 571 |
| | | C-P-P-G-P-A-G-G-A-P-P-P-A-A- | | | | |
| | | A | | | | |
| OH-4867-31-48 | 28 | C-A-G-C-C-G-P-P-C-A-A-G-P-G- | NB | 142 | NB | 572 |
| | | C-P-P-G-P-A-G-G-A-P-P-P-A-A | | | | |
| OH-4867-31-49 | 27 | C-A-G-C-C-G-P-P-C-A-A-G-P-G- | NB | NB | NB | 573 |
| | | C-P-P-G-P-A-G-G-A-P-P-P-A | | | | |
| OH-4867-31-50 | 26 | C-A-G-C-C-G-P-P-C-A-A-G-P-G- | NB | NB | NB | 574 |
| | | C-P-P-G-P-A-G-G-A-P-P-P | | | | |
| OH-4867-31-51 | 31 | A-G-C-C-G-P-P-C-A-A-G-P-G-C- | 0.11 | 0.074 | 0.20 | 575 |
| | | P-P-G-P-A-G-G-A-P-P-P-A-A-A- | | | | |
| | | P-G-G | | | | |
| OH-4867-31-52 | 30 | A-G-C-C-G-P-P-C-A-A-G-P-G-C- | 0.17 | 0.58 | 2.8 | 576 |
| | | P-P-G-P-A-G-G-A-P-P-P-A-A-A- | | | | |
| | | P-G | | | | |
| OH-4867-31-53 | 29 | A-G-C-C-G-P-P-C-A-A-G-P-G-C- | 3.2 | NB | 19 | 577 |
| | | P-P-G-P-A-G-G-A-P-P-P-A-A-A- | | | | |
| | | P | | | | |
| OH-4867-31-54 | 28 | A-G-C-C-G-P-P-C-A-A-G-P-G-C- | NB | NB | NB | 578 |
| | | P-P-G-P-A-G-G-A-P-P-P-A-A-A | | | | |
| OH-4867-31-55 | 27 | A-G-C-C-G-P-P-C-A-A-G-P-G-C- | NB | NB | NB | 579 |
| | | P-P-G-P-A-G-G-A-P-P-P-A-A | | | | |
| OH-4867-31-56 | 26 | A-G-C-C-G-P-P-C-A-A-G-P-G-C- | NB | NB | NB | 580 |
| | | P-P-G-P-A-G-G-A-P-P-P-A | | | | |
| OH-4867-31-57 | 25 | A-G-C-C-G-P-P-C-A-A-G-P-G-C- | NB | NB | NB | 581 |
| | | P-P-G-P-A-G-G-A-P-P-P | | | | |
| OH-4867-31-58 | 31 | G-C-C-G-P-P-C-A-A-G-P-G-C-P- | 0.10 | 0.21 | 0.15 | 582 |
| | | P-G-P-A-G-G-A-P-P-P-A-A-A-P- | | | | |
| | | G-G-A | | | | |
| OH-4867-31-59 | 30 | C-C-G-P-P-C-A-A-G-P-G-C-P-P- | 0.16 | 0.20 | 0.14 | 583 |
| | | G-P-A-G-G-A-P-P-P-A-A-A-P-G- | | | | |
| | | G-A | | | | |
| OH-4867-31-60 | 29 | C-G-P-P-C-A-A-G-P-G-C-P-P-G- | 0.61 | 1.4 | 2.2 | 584 |
| | | P-A-G-G-A-P-P-P-A-A-A-P-G-G- | | | | |
| | | A | | | | |
| OH-4867-31-61 | 28 | G-P-P-C-A-A-G-P-G-C-P-P-G-P- | 2.9 | 13 | 33 | 585 |
| | | A-G-G-A-P-P-P-A-A-A-P-G-G-A | | | | |
| OH-4867- | 29 | C-C-G-P-P-C-A-A-G-P-G-C-P-P- | | | 0.17 | 586 |
| 31_143 | | G-P-A-G-G-A-P-P-P-A-A-A-P-G- | | | | |
| | | G | | | | |
| OH-4867- | 30 | G-C-C-G-P-P-C-A-A-G-P-G-C-P- | | | 0.20 | 587 |
| 31_144 | | P-G-P-A-G-G-A-P-P-P-A-A-A-P- | | | | |
| | | G-G | | | | |

TABLE 11
C3 spacer substitutions at all positions in 4867-15_2.

| | | K_{d} | ratio to | |
|---|---|---|---|---|
| Aptamer ID. No. | Sequence 5′→ 3′ | (nM) | parent | Seq. ID. NO. |
| OH-4867-31_2 | C-C-C-T-C-C-A-P-C-A-G-C-C-G-P-P-C-A-A-G-P-G-C-P-P-G-P-A-G- | 0.15 | 1 | 588 |
| | G-A-P-P-P-A-A-A-P-G-G-A-A-P-P-G-G-A-G-G-A | | | |
| OH-4867-15-24 | V-C-C-T-C-C-A-P-C-A-G-C-C-G-P-P-C-A-A-G-P-G-C-P-P-G-P-A-G- | 0.11 | 0.72 | 589 |
| | G-A-P-P-P-A-A-A-P-G-G-A-A-P-P-G-G-A-G-G-A | | | |
| OH-4867-15-25 | C-V-C-T-C-C-A-P-C-A-G-C-C-G-P-P-C-A-A-G-P-G-C-P-P-G-P-A-G- | 0.13 | 0.84 | 590 |
| | G-A-P-P-P-A-A-A-P-G-G-A-A-P-P-G-G-A-G-G-A | | | |
| OH-4867-15-26 | C-C-V-T-C-C-A-P-C-A-G-C-C-G-P-P-C-A-A-G-P-G-C-P-P-G-P-A-G- | 0.20 | 1.3 | 591 |
| | G-A-P-P-P-A-A-A-P-G-G-A-A-P-P-G-G-A-G-G-A | | | |
| OH-4867-15-27 | C-C-C-V-C-C-A-P-C-A-G-C-C-G-P-P-C-A-A-G-P-G-C-P-P-G-P-A-G- | 0.40 | 2.7 | 592 |
| | G-A-P-P-P-A-A-A-P-G-G-A-A-P-P-G-G-A-G-G-A | | | |
| OH-4867-15-28 | C-C-C-T-V-C-A-P-C-A-G-C-C-G-P-P-C-A-A-G-P-G-C-P-P-G-P-A-G- | 0.34 | 2.3 | 593 |
| | G-A-P-P-P-A-A-A-P-G-G-A-A-P-P-G-G-A-G-G-A | | | |
| OH-4867-15-29 | C-C-C-T-C-V-A-P-C-A-G-C-C-G-P-P-C-A-A-G-P-G-C-P-P-G-P-A-G- | 0.20 | 1.4 | 594 |
| | G-A-P-P-P-A-A-A-P-G-G-A-A-P-P-G-G-A-G-G-A | | | |
| OH-4867-15-30 | C-C-C-T-C-C-V-P-C-A-G-C-C-G-P-P-C-A-A-G-P-G-C-P-P-G-P-A-G- | 0.11 | 0.76 | 595 |
| | G-A-P-P-P-A-A-A-P-G-G-A-A-P-P-G-G-A-G-G-A | | | |
| OH-4867-15-31 | C-C-C-T-C-C-A-V-C-A-G-C-C-G-P-P-C-A-A-G-P-G-C-P-P-G-P-A-G- | 0.095 | 0.64 | 596 |
| | G-A-P-P-P-A-A-A-P-G-G-A-A-P-P-G-G-A-G-G-A | | | |
| OH-4867-15-32 | C-C-C-T-C-C-A-P-V-A-G-C-C-G-P-P-C-A-A-G-P-G-C-P-P-G-P-A-G- | 0.079 | 0.53 | 597 |
| | G-A-P-P-P-A-A-A-P-G-G-A-A-P-P-G-G-A-G-G-A | | | |
| OH-4867-15-33 | C-C-C-T-C-C-A-P-C-V-G-C-C-G-P-P-C-A-A-G-P-G-C-P-P-G-P-A-G- | 0.12 | 0.83 | 598 |
| | G-A-P-P-P-A-A-A-P-G-G-A-A-P-P-G-G-A-G-G-A | | | |
| OH-4867-15-34 | C-C-C-T-C-C-A-P-C-A-V-C-C-G-P-P-C-A-A-G-P-G-C-P-P-G-P-A-G- | 0.14 | 0.95 | 599 |
| | G-A-P-P-P-A-A-A-P-G-G-A-A-P-P-G-G-A-G-G-A | | | |
| OH-4867-15-35 | C-C-C-T-C-C-A-P-C-A-G-V-C-G-P-P-C-A-A-G-P-G-C-P-P-G-P-A-G- | 3.4 | 23 | 600 |
| | G-A-P-P-P-A-A-A-P-G-G-A-A-P-P-G-G-A-G-G-A | | | |
| OH-4867-15-36 | C-C-C-T-C-C-A-P-C-A-G-C-V-G-P-P-C-A-A-G-P-G-C-P-P-G-P-A-G- | 23 | 153 | 601 |
| | G-A-P-P-P-A-A-A-P-G-G-A-A-P-P-G-G-A-G-G-A | | | |
| OH-4867-15-37 | C-C-C-T-C-C-A-P-C-A-G-C-C-V-P-P-C-A-A-G-P-G-C-P-P-G-P-A-G- | 30 | 205 | 602 |
| | G-A-P-P-P-A-A-A-P-G-G-A-A-P-P-G-G-A-G-G-A | | | |
| OH-4867-15-38 | C-C-C-T-C-C-A-P-C-A-G-C-C-G-V-P-C-A-A-G-P-G-C-P-P-G-P-A-G- | NB | — | 603 |
| | G-A-P-P-P-A-A-A-P-G-G-A-A-P-P-G-G-A-G-G-A | | | |
| OH-4867-15-39 | C-C-C-T-C-C-A-P-C-A-G-C-C-G-P-V-C-A-A-G-P-G-C-P-P-G-P-A-G- | NB | — | 604 |
| | G-A-P-P-P-A-A-A-P-G-G-A-A-P-P-G-G-A-G-G-A | | | |
| OH-4867-15-40 | C-C-C-T-C-C-A-P-C-A-G-C-C-G-P-P-V-A-A-G-P-G-C-P-P-G-P-A-G- | 0.17 | 1.1 | 605 |
| | G-A-P-P-P-A-A-A-P-G-G-A-A-P-P-G-G-A-G-G-A | | | |
| OH-4867-15-41 | C-C-C-T-C-C-A-P-C-A-G-C-C-G-P-P-C-V-A-G-P-G-C-P-P-G-P-A-G- | 13 | 85 | 606 |
| | G-A-P-P-P-A-A-A-P-G-G-A-A-P-P-G-G-A-G-G-A | | | |
| OH-4867-15-42 | C-C-C-T-C-C-A-P-C-A-G-C-C-G-P-P-C-A-V-G-P-G-C-P-P-G-P-A-G- | 31 | 207 | 607 |
| | G-A-P-P-P-A-A-A-P-G-G-A-A-P-P-G-G-A-G-G-A | | | |
| OH-4867-15-43 | C-C-C-T-C-C-A-P-C-A-G-C-C-G-P-P-C-A-A-V-P-G-C-P-P-G-P-A-G- | 9.2 | 62 | 608 |
| | G-A-P-P-P-A-A-A-P-G-G-A-A-P-P-G-G-A-G-G-A | | | |
| OH-4867-15-44 | C-C-C-T-C-C-A-P-C-A-G-C-C-G-P-P-C-A-A-G-V-G-C-P-P-G-P-A-G- | NB | — | 609 |
| | G-A-P-P-P-A-A-A-P-G-G-A-A-P-P-G-G-A-G-G-A | | | |
| OH-4867-15-45 | C-C-C-T-C-C-A-P-C-A-G-C-C-G-P-P-C-A-A-G-P-V-C-P-P-G-P-A-G- | 3.5 | 24 | 610 |
| | G-A-P-P-P-A-A-A-P-G-G-A-A-P-P-G-G-A-G-G-A | | | |
| OH-4867-15-46 | C-C-C-T-C-C-A-P-C-A-G-C-C-G-P-P-C-A-A-G-P-G-V-P-P-G-P-A-G- | NB | — | 611 |
| | G-A-P-P-P-A-A-A-P-G-G-A-A-P-P-G-G-A-G-G-A | | | |
| OH-4867-15-47 | C-C-C-T-C-C-A-P-C-A-G-C-C-G-P-P-C-A-A-G-P-G-C-V-P-G-P-A-G- | NB | — | 612 |
| | G-A-P-P-P-A-A-A-P-G-G-A-A-P-P-G-G-A-G-G-A | | | |
| OH-4867-15-48 | C-C-C-T-C-C-A-P-C-A-G-C-C-G-P-P-C-A-A-G-P-G-C-P-V-G-P-A-G- | NB | — | 613 |
| | G-A-P-P-P-A-A-A-P-G-G-A-A-P-P-G-G-A-G-G-A | | | |
| OH-4867-15-49 | C-C-C-T-C-C-A-P-C-A-G-C-C-G-P-P-C-A-A-G-P-G-C-P-P-V-P-A-G- | 0.079 | 0.54 | 614 |
| | G-A-P-P-P-A-A-A-P-G-G-A-A-P-P-G-G-A-G-G-A | | | |
| OH-4867-15-50 | C-C-C-T-C-C-A-P-C-A-G-C-C-G-P-P-C-A-A-G-P-G-C-P-P-G-V-A-G- | 3.5 | 24 | 615 |
| | G-A-P-P-P-A-A-A-P-G-G-A-A-P-P-G-G-A-G-G-A | | | |
| OH-4867-15-51 | C-C-C-T-C-C-A-P-C-A-G-C-C-G-P-P-C-A-A-G-P-G-C-P-P-G-P-V-G- | 1.6 | 11 | 616 |
| | G-A-P-P-P-A-A-A-P-G-G-A-A-P-P-G-G-A-G-G-A | | | |
| OH-4867-15-52 | C-C-C-T-C-C-A-P-C-A-G-C-C-G-P-P-C-A-A-G-P-G-C-P-P-G-P-A-V- | 0.20 | 1.3 | 617 |
| | G-A-P-P-P-A-A-A-P-G-G-A-A-P-P-G-G-A-G-G-A | | | |
| OH-4867-15-53 | C-C-C-T-C-C-A-P-C-A-G-C-C-G-P-P-C-A-A-G-P-G-C-P-P-G-P-A-G- | 23 | 157 | 618 |
| | V-A-P-P-P-A-A-A-P-G-G-A-A-P-P-G-G-A-G-G-A | | | |
| OH-4867-15-54 | C-C-C-T-C-C-A-P-C-A-G-C-C-G-P-P-C-A-A-G-P-G-C-P-P-G-P-A-G- | NB | — | 619 |
| | G-V-P-P-P-A-A-A-P-G-G-A-A-P-P-G-G-A-G-G-A | | | |
| OH-4867-15-55 | C-C-C-T-C-C-A-P-C-A-G-C-C-G-P-P-C-A-A-G-P-G-C-P-P-G-P-A-G- | NB | — | 620 |
| | G-A-V-P-P-A-A-A-P-G-G-A-A-P-P-G-G-A-G-G-A | | | |
| OH-4867-15-56 | C-C-C-T-C-C-A-P-C-A-G-C-C-G-P-P-C-A-A-G-P-G-C-P-P-G-P-A-G- | NB | — | 621 |
| | G-A-P-V-P-A-A-A-P-G-G-A-A-P-P-G-G-A-G-G-A | | | |
| OH-4867-15-57 | C-C-C-T-C-C-A-P-C-A-G-C-C-G-P-P-C-A-A-G-P-G-C-P-P-G-P-A-G- | NB | — | 622 |
| | G-A-P-P-V-A-A-A-P-G-G-A-A-P-P-G-G-A-G-G-A | | | |
| OH-4867-15-58 | C-C-C-T-C-C-A-P-C-A-G-C-C-G-P-P-C-A-A-G-P-G-C-P-P-G-P-A-G- | NB | — | 623 |
| | G-A-P-P-P-V-A-A-P-G-G-A-A-P-P-G-G-A-G-G-A | | | |
| OH-4867-15-59 | C-C-C-T-C-C-A-P-C-A-G-C-C-G-P-P-C-A-A-G-P-G-C-P-P-G-P-A-G- | NB | — | 624 |
| | G-A-P-P-P-A-V-A-P-G-G-A-A-P-P-G-G-A-G-G-A | | | |
| OH-4867-15-60 | C-C-C-T-C-C-A-P-C-A-G-C-C-G-P-P-C-A-A-G-P-G-C-P-P-G-P-A-G- | NB | — | 625 |
| | G-A-P-P-P-A-A-V-P-G-G-A-A-P-P-G-G-A-G-G-A | | | |
| OH-4867-15-61 | C-C-C-T-C-C-A-P-C-A-G-C-C-G-P-P-C-A-A-G-P-G-C-P-P-G-P-A-G- | NB | — | 626 |
| | G-A-P-P-P-A-A-A-V-G-G-A-A-P-P-G-G-A-G-G-A | | | |
| OH-4867-15-62 | C-C-C-T-C-C-A-P-C-A-G-C-C-G-P-P-C-A-A-G-P-G-C-P-P-G-P-A-G- | 53 | 361 | 627 |
| | G-A-P-P-P-A-A-A-P-V-G-A-A-P-P-G-G-A-G-G-A | | | |
| OH-4867-15-63 | C-C-C-T-C-C-A-P-C-A-G-C-C-G-P-P-C-A-A-G-P-G-C-P-P-G-P-A-G- | 15 | 101 | 628 |
| | G-A-P-P-P-A-A-A-P-G-V-A-A-P-P-G-G-A-G-G-A | | | |
| OH-4867-15-64 | C-C-C-T-C-C-A-P-C-A-G-C-C-G-P-P-C-A-A-G-P-G-C-P-P-G-P-A-G- | 0.22 | 1.5 | 629 |
| | G-A-P-P-P-A-A-A-P-G-G-V-A-P-P-G-G-A-G-G-A | | | |
| OH-4867-15-65 | C-C-C-T-C-C-A-P-C-A-G-C-C-G-P-P-C-A-A-G-P-G-C-P-P-G-P-A-G- | 0.13 | 0.88 | 630 |
| | G-A-P-P-P-A-A-A-P-G-G-A-V-P-P-G-G-A-G-G-A | | | |
| OH-4867-15-66 | C-C-C-T-C-C-A-P-C-A-G-C-C-G-P-P-C-A-A-G-P-G-C-P-P-G-P-A-G- | 0.11 | 0.72 | 631 |
| | G-A-P-P-P-A-A-A-P-G-G-A-A-V-P-G-G-A-G-G-A | | | |
| OH-4867-15-67 | C-C-C-T-C-C-A-P-C-A-G-C-C-G-P-P-C-A-A-G-P-G-C-P-P-G-P-A-G- | 0.15 | 0.99 | 632 |
| | G-A-P-P-P-A-A-A-P-G-G-A-A-P-V-G-G-A-G-G-A | | | |
| OH-4867-15-68 | C-C-C-T-C-C-A-P-C-A-G-C-C-G-P-P-C-A-A-G-P-G-C-P-P-G-P-A-G- | 0.32 | 2.1 | 633 |
| | G-A-P-P-P-A-A-A-P-G-G-A-A-P-P-V-G-A-G-G-A | | | |
| OH-4867-15-69 | C-C-C-T-C-C-A-P-C-A-G-C-C-G-P-P-C-A-A-G-P-G-C-P-P-G-P-A-G- | 0.77 | 5.2 | 634 |
| | G-A-P-P-P-A-A-A-P-G-G-A-A-P-P-G-V-A-G-G-A | | | |
| OH-4867-15-70 | C-C-C-T-C-C-A-P-C-A-G-C-C-G-P-P-C-A-A-G-P-G-C-P-P-G-P-A-G- | 0.68 | 4.6 | 635 |
| | G-A-P-P-P-A-A-A-P-G-G-A-A-P-P-G-G-V-G-G-A | | | |
| OH-4867-15-71 | C-C-C-T-C-C-A-P-C-A-G-C-C-G-P-P-C-A-A-G-P-G-C-P-P-G-P-A-G- | 0.24 | 1.6 | 636 |
| | G-A-P-P-P-A-A-A-P-G-G-A-A-P-P-G-G-A-V-G-A | | | |
| OH-4867-15-72 | C-C-C-T-C-C-A-P-C-A-G-C-C-G-P-P-C-A-A-G-P-G-C-P-P-G-P-A-G- | 0.19 | 1.3 | 637 |
| | G-A-P-P-P-A-A-A-P-G-G-A-A-P-P-G-G-A-G-V-A | | | |
| OH-4867-15-73 | C-C-C-T-C-C-A-P-C-A-G-C-C-G-P-P-C-A-A-G-P-G-C-P-P-G-P-A-G- | 0.17 | 1.1 | 638 |
| | G-A-P-P-P-A-A-A-P-G-G-A-A-P-P-G-G-A-G-G-V | | | |

TABLE 12
2′-O-methyl substitutions in VEGF aptamer 4867-31_43

| | | | ratio | Seq. |
|---|---|---|---|---|
| | | | to | ID. |
| Aptamer ID. No. | Sequence 5′ → 3′ | K_{d} (nM) | parent | NO. |
| OH-4867-31-43 | A-G-C-C-G-P-P-C-A-A-G-P-G-C-P-P-G-P-A-G- | 0.29 | 1.0 | 567 |
| | G-A-P-P-P-A-A-A-P-G-G-A | | | |
| OH-4867-31_65 | A¹-G-C-C-G-P-P-C-A-A-G-P-G-C-P-P-G-P-A-G- | NB | — | 639 |
| | G-A-P-P-P-A-A-A-P-G-G-A | | | |
| OH-4867-31_66 | A-G¹-C-C-G-P-P-C-A-A-G-P-G-C-P-P-G-P-A-G- | 0.17 | 0.6 | 640 |
| | G-A-P-P-P-A-A-A-P-G-G-A | | | |
| OH-4867-31_67 | A-G-C¹-C-G-P-P-C-A-A-G-P-G-C-P-P-G-P-A-G- | 0.33 | 1.2 | 641 |
| | G-A-P-P-P-A-A-A-P-G-G-A | | | |
| OH-4867-31_68 | A-G-C-C¹-G-P-P-C-A-A-G-P-G-C-P-P-G-P-A-G- | 7.55 | 26.0 | 642 |
| | G-A-P-P-P-A-A-A-P-G-G-A | | | |
| OH-4867-31_69 | A-G-C-C-G¹-P-P-C-A-A-G-P-G-C-P-P-G-P-A-G- | NB | — | 643 |
| | G-A-P-P-P-A-A-A-P-G-G-A | | | |
| OH-4867-31_70 | A-G-C-C-G-U¹-P-C-A-A-G-P-G-C-P-P-G-P-A- | NB | — | 644 |
| | G-G-A-P-P-P-A-A-A-P-G-G-A | | | |
| OH-4867-31_71 | A-G-C-C-G-P-U¹-C-A-A-G-P-G-C-P-P-G-P-A- | NB | — | 645 |
| | G-G-A-P-P-P-A-A-A-P-G-G-A | | | |
| OH-4867-31_72 | A-G-C-C-G-P-P-C¹-A-A-G-P-G-C-P-P-G-P-A-G- | 0.21 | 0.7 | 646 |
| | G-A-P-P-P-A-A-A-P-G-G-A | | | |
| OH-4867-31_73 | A-G-C-C-G-P-P-C-A¹-A-G-P-G-C-P-P-G-P-A-G- | 5.99 | 20.7 | 647 |
| | G-A-P-P-P-A-A-A-P-G-G-A | | | |
| OH-4867-31_74 | A-G-C-C-G-P-P-C-A-A¹-G-P-G-C-P-P-G-P-A-G- | 3.14 | 10.8 | 648 |
| | G-A-P-P-P-A-A-A-P-G-G-A | | | |
| OH-4867-31_75 | A-G-C-C-G-P-P-C-A-A-G¹-P-G-C-P-P-G-P-A-G- | 0.15 | 0.5 | 649 |
| | G-A-P-P-P-A-A-A-P-G-G-A | | | |
| OH-4867-31_76 | A-G-C-C-G-P-P-C-A-A-G-U¹-G-C-P-P-G-P-A- | 22.90 | 79.0 | 650 |
| | G-G-A-P-P-P-A-A-A-P-G-G-A | | | |
| OH-4867-31_77 | A-G-C-C-G-P-P-C-A-A-G-P-G¹-C-P-P-G-P-A-G- | 6.64 | 22.9 | 651 |
| | G-A-P-P-P-A-A-A-P-G-G-A | | | |
| OH-4867-31_78 | A-G-C-C-G-P-P-C-A-A-G-P-G-C¹-P-P-G-P-A-G- | 0.24 | 0.8 | 652 |
| | G-A-P-P-P-A-A-A-P-G-G-A | | | |
| OH-4867-31_79 | A-G-C-C-G-P-P-C-A-A-G-P-G-C-U¹-P-G-P-A- | NB | — | 653 |
| | G-G-A-P-P-P-A-A-A-P-G-G-A | | | |
| OH-4867-31_80 | A-G-C-C-G-P-P-C-A-A-G-P-G-C-P-U¹-G-P-A- | NB | — | 654 |
| | G-G-A-P-P-P-A-A-A-P-G-G-A | | | |
| OH-4867-31_81 | A-G-C-C-G-P-P-C-A-A-G-P-G-C-P-P-G¹-P-A-G- | 0.44 | 1.5 | 655 |
| | G-A-P-P-P-A-A-A-P-G-G-A | | | |
| OH-4867-31_82 | A-G-C-C-G-P-P-C-A-A-G-P-G-C-P-P-G-U¹-A- | NB | — | 656 |
| | G-G-A-P-P-P-A-A-A-P-G-G-A | | | |
| OH-4867-31_83 | A-G-C-C-G-P-P-C-A-A-G-P-G-C-P-P-G-P-A¹-G- | 0.10 | 0.3 | 657 |
| | G-A-P-P-P-A-A-A-P-G-G-A | | | |
| OH-4867-31_84 | A-G-C-C-G-P-P-C-A-A-G-P-G-C-P-P-G-P-A-G¹- | 0.21 | 0.7 | 658 |
| | G-A-P-P-P-A-A-A-P-G-G-A | | | |
| OH-4867-31_85 | A-G-C-C-G-P-P-C-A-A-G-P-G-C-P-P-G-P-A-G- | 25.80 | 89.0 | 659 |
| | G¹-A-P-P-P-A-A-A-P-G-G-A | | | |
| OH-4867-31_86 | A-G-C-C-G-P-P-C-A-A-G-P-G-C-P-P-G-P-A-G- | 6.21 | 21.4 | 660 |
| | G-A¹-P-P-P-A-A-A-P-G-G-A | | | |
| OH-4867-31_87 | A-G-C-C-G-P-P-C-A-A-G-P-G-C-P-P-G-P-A-G- | NB | — | 661 |
| | G-A-U¹-P-P-A-A-A-P-G-G-A | | | |
| OH-4867-31_88 | A-G-C-C-G-P-P-C-A-A-G-P-G-C-P-P-G-P-A-G- | NB | — | 662 |
| | G-A-P-U¹-P-A-A-A-P-G-G-A | | | |
| OH-4867-31_89 | A-G-C-C-G-P-P-C-A-A-G-P-G-C-P-P-G-P-A-G- | NB | — | 663 |
| | G-A-P-P-U¹-A-A-A-P-G-G-A | | | |
| OH-4867-31_90 | A-G-C-C-G-P-P-C-A-A-G-P-G-C-P-P-G-P-A-G- | 2.85 | 9.8 | 664 |
| | G-A-P-P-P-A¹-A-A-P-G-G-A | | | |
| OH-4867-31_91 | A-G-C-C-G-P-P-C-A-A-G-P-G-C-P-P-G-P-A-G- | 0.35 | 1.2 | 665 |
| | G-A-P-P-P-A-A¹-A-P-G-G-A | | | |
| OH-4867-31_92 | A-G-C-C-G-P-P-C-A-A-G-P-G-C-P-P-G-P-A-G- | 8.87 | 30.6 | 666 |
| | G-A-P-P-P-A-A-A¹-P-G-G-A | | | |
| OH-4867-31_93 | A-G-C-C-G-P-P-C-A-A-G-P-G-C-P-P-G-P-A-G- | NB | — | 667 |
| | G-A-P-P-P-A-A-A-U¹-G-G-A | | | |
| OH-4867-31_94 | A-G-C-C-G-P-P-C-A-A-G-P-G-C-P-P-G-P-A-G- | 0.21 | 0.7 | 668 |
| | G-A-P-P-P-A-A-A-P-G¹-G-A | | | |
| OH-4867-31_95 | A-G-C-C-G-P-P-C-A-A-G-P-G-C-P-P-G-P-A-G- | 0.19 | 0.7 | 669 |
| | G-A-P-P-P-A-A-A-P-G-G¹-A | | | |
| OH-4867-31_96 | A-G-C-C-G-P-P-C-A-A-G-P-G-C-P-P-G-P-A-G- | 0.13 | 0.4 | 670 |
| | G-A-P-P-P-A-A-A-P-G-G-A¹ | | | |
| OH-4867-31_97 | A-G-C-C-G-P-P-V-A-A-G-P-G-C-P-P-G-P-A-G- | 7.30 | 25.2 | 671 |
| | G-A-P-P-P-A-A-A-P-G-G-A | | | |
| OH-4867-31_98 | A-G-C-C-G-P-P-C-A-A-G-P-G-C-P-P-V-P-A-G- | 0.10 | 0.3 | 672 |
| | G-A-P-P-P-A-A-A-P-G-G-A | | | |
| OH-4867-31_99 | A-G-C-C-G-P-P-C-A-A-G-P-G-C-P-P-G-P-A-V- | 0.22 | 0.8 | 673 |
| | G-A-P-P-P-A-A-A-P-G-G-A | | | |
| OH-4867-31_100 | A-G-C-C-G-P-P-V-A-A-G-P-G-C-P-P-V-P-A-V- | NB | — | 674 |
| | G-A-P-P-P-A-A-A-P-G-G-A | | | |
| OH-4867-31_101 | A-G-C-C-G-P-P-A-A-G-P-G-C-P-P-G-P-A-G-G- | 5.89 | 20.3 | 675 |
| | A-P-P-P-A-A-A-P-G-G-A | | | |
| OH-4867-31_102 | A-G-C-C-G-P-P-C-A-A-G-P-G-C-P-P-P-A-G-G- | NB | — | 676 |
| | A-P-P-P-A-A-A-P-G-G-A | | | |
| OH-4867-31_103 | A-G-C-C-G-P-P-C-A-A-G-P-G-C-P-P-G-P-A-G- | NB | — | 677 |
| | A-P-P-P-A-A-A-P-G-G-A | | | |
| OH-4867-31_145 | C-C-G-P-P-A-A-A-G-P-G-C-P-P-G-P-A-G-G-A- | 3.08 | 10.6 | 678 |
| | P-P-P-A-A-A-P-G-G-A | | | |
| OH-4867-31_146 | C-C-G-P-P-G-A-A-G-P-G-C-P-P-G-P-A-G-G-A- | 5.98 | 20.6 | 679 |
| | P-P-P-A-A-A-P-G-G-A | | | |
| OH-4867-31_147 | C-C-G-P-P-T-A-A-G-P-G-C-P-P-G-P-A-G-G-A- | 3.28 | 11.3 | 680 |
| | P-P-P-A-A-A-P-G-G-A | | | |
| OH-4867-31_148 | C-C-G-P-P-C-A-A-G-P-G-C-P-P-A-P-A-G-G-A- | 0.53 | 1.8 | 681 |
| | P-P-P-A-A-A-P-G-G-A | | | |
| OH-4867-31_149 | C-C-G-P-P-C-A-A-G-P-G-C-P-P-C-P-A-G-G-A- | 0.27 | 0.9 | 682 |
| | P-P-P-A-A-A-P-G-G-A | | | |
| OH-4867-31_150 | C-C-G-P-P-C-A-A-G-P-G-C-P-P-T-P-A-G-G-A- | 0.24 | 0.8 | 683 |
| | P-P-P-A-A-A-P-G-G-A | | | |
| OH-4867-31_151 | C-C-G-P-P-C-A-A-G-P-G-C-P-P-G-P-A-A-G-A- | 0.16 | 0.6 | 684 |
| | P-P-P-A-A-A-P-G-G-A | | | |
| OH-4867-31_152 | C-C-G-P-P-C-A-A-G-P-G-C-P-P-G-P-A-C-G-A- | 0.32 | 1.1 | 685 |
| | P-P-P-A-A-A-P-G-G-A | | | |
| OH-4867-31_153 | C-C-G-P-P-C-A-A-G-P-G-C-P-P-G-P-A-T-G-A- | 0.21 | 0.7 | 686 |
| | P-P-P-A-A-A-P-G-G-A | | | |

TABLE 13
Single 2′-O-methyl Nap-U Substitutions, and multiple 2′-O-methyl
substitutions in VEGF aptamer 4867-31_143

| Aptamer | | | ratio to | % Activity | Seq. ID. |
|---|---|---|---|---|---|
| ID. No. | Sequence 5′→ 3′ | K_{d} (M) | parent | Remaining | NO. |
| 4867-31_143 | C-C-G-P-P-C-A-A-G-P-G-C-P-P-G-P-A-G-G-A-P-P-P-A-A-A- | 1.4E−10 | 1.0 | 12%, 7% | 586 |
| | P-G-G | | | | |
| 4867-31_154 | C-C-G-P¹-P-C-A-A-G-P-G-C-P-P-G-P-A-G-G-A-P-P-P-A-A-A- | 5.9E−09 | 44 | | 687 |
| | P-G-G | | | | |
| 4867-31_155 | C-C-G-P-P¹-C-A-A-G-P-G-C-P-P-G-P-A-G-G-A-P-P-P-A-A-A- | 3.3E−09 | 24 | | 688 |
| | P-G-G | | | | |
| 4867-31_156 | C-C-G-P-P-C-A-A-G-P¹-G-C-P-P-G-P-A-G-G-A-P-P-P-A-A-A- | 6.8E−10 | 5.0 | 52%, 74% | 689 |
| | P-G-G | | | | |
| 4867-31_157 | C-C-G-P-P-C-A-A-G-P-G-C-P¹-P-G-P-A-G-G-A-P-P-P-A-A-A- | 1.5E−09 | 11 | 54%, 101% | 690 |
| | P-G-G | | | | |
| 4867-31_158 | C-C-G-P-P-C-A-A-G-P-G-C-P-P¹-G-P-A-G-G-A-P-P-P-A-A-A- | 1.7E−09 | 12 | 59%, 106% | 691 |
| | P-G-G | | | | |
| 4867-31_159 | C-C-G-P-P-C-A-A-G-P-G-C-P-P-G-P¹-A-G-G-A-P-P-P-A-A-A- | 5.6E−10 | 4.1 | 7%, 64% | 692 |
| | P-G-G | | | | |
| 4867-31_160 | C-C-G-P-P-C-A-A-G-P-G-C-P-P-G-P-A-G-G-A-P¹-P-P-A-A-A- | 1.5E−09 | 11 | 52%, 95% | 693 |
| | P-G-G | | | | |
| 4867-31_161 | C-C-G-P-P-C-A-A-G-P-G-C-P-P-G-P-A-G-G-A-P-P¹-P-A-A-A- | 6.4E−11 | 0.47 | 5%, 4%, −2% | 694 |
| | P-G-G | | | | |
| 4867-31_162 | C-C-G-P-P-C-A-A-G-P-G-C-P-P-G-P-A-G-G-A-P-P-P¹-A-A-A- | 8.9E−09 | 65 | 84%, 117% | 695 |
| | P-G-G | | | | |
| 4867-31_163 | C-C-G-P-P-C-A-A-G-P-G-C-P-P-G-P-A-G-G-A-P-P-P-A-A-A- | 2.6E−10 | 1.9 | 53%, 45% | 696 |
| | P¹-G-G | | | | |
| 4867-31_183 | C-C-G-P-P-C-A-A-G-P-G-C-P-P-V-P-A-V-G-A-P-P-P-A-A-A- | 9.1E−11 | 0.67 | 15% | 697 |
| | P-G-G | | | | |
| 4867-31_184 | C-C-G-P-P-C-A-A-G¹-P-G-C-P-P-V-P-A¹-V-G-A-P-P-P-A-A- | 8.4E−11 | 0.62 | 7% | 698 |
| | A-P-G-G | | | | |
| 4867-31_185 | C-C-G-P-P-C¹-A-A-G¹-P-G-C¹-P-P-V-P-A¹-V-G-A-P-P-P-A-A- | 2.6E−10 | 1.9 | 50% | 699 |
| | A-P-G¹-G¹ | | | | |
| 4867-31_186 | C¹-C-G-P-P-C¹-A-A-G¹-P-G-C¹-P-P-V-P-A¹-V-G-A-P-P-P-A- | 1.6E−09 | 12 | 77% | 700 |
| | A¹-A-P-G¹-G¹ | | | | |
| 4867-31_187 | C-C-G-P-P-C-A-A-G¹-P-G-C-P-P-V-P-A¹-G-G-A-P-P-P-A-A- | 3.2E−11 | 0.24 | −2% | 701 |
| | A-P-G-G | | | | |
| 4867-31_188 | C-C-G-P-P-C¹-A-A-G¹-P-G-C¹-P-P-V-P-A¹-G¹-G-A-P-P-P-A-A- | 3.8E−11 | 0.28 | −2% | 702 |
| | A-P-G¹-G¹ | | | | |
| 4867-31_189 | C¹-C-G-P-P-C¹-A-A-G¹-P-G-C¹-P-P-V-P-A¹-G¹-G-A-P-P-P-A- | 9.0E−10 | 6.6 | 13% | 703 |
| | A¹-A-P-G¹-G¹ | | | | |

TABLE 14
Multiple 2′-O-methyl substitutions in VEGF aptamer 4867-31_143

| | | | Ratio to | |
|---|---|---|---|---|
| Aptamer ID. | | | 4867- | Seq. ID. |
| No. | Sequence 5′→3′ | K_{d} (M) | 31_188 | NO. |
| 4867-31_188 | C-C-G-P-P-C¹-A-A-G¹-P-G-C¹-P-P-V-P-A¹-G¹-G-A-P-P-P-A- | 4.8E−11 | 1.0 | 702 |
| | A-A-P-G¹-G¹ | | | |
| 4867-31_190 | C-C-G-P-P-C-A-A-G¹-P-G-C¹-P-P-V-P-A¹-G¹-G-A-P-P¹-P-A- | 8.9E−11 | 1.9 | 704 |
| | A-A-P-G¹-G¹ | | | |
| 4867-31_191 | C-C-G-P-P-C¹-A-A-G¹-P-G-C¹-P-P-G¹-P-A¹-G¹-G-A-P-P-P-A- | 1.0E−10 | 2.1 | 705 |
| | A-A-P-G¹-G¹ | | | |
| 4867-31_192 | C-C-G-P-P-C¹-A-A-G¹-P-G-C¹-P-P-G¹-P-A¹-G¹-G-A-P-P¹-P-A- | 3.5E−11 | 0.7 | 706 |
| | A-A-P-G¹-G¹ | | | |

TABLE 15
PDGF homodimers of 4149-8_379 and 5169-4_26.

| Aptamer ID. | | | Seq. ID. |
|---|---|---|---|
| No. | Sequence (5′ →3′) | Kᵢ (pM) | NO. |
| 4149-8_438 | Z-M-A¹-C-H-G-Z¹-Z-A-C-CS-C¹-G-C-G-Z-Z- | 4.2 | 707 |
| | Z¹-A¹-Z-A¹-G-C-G¹-Z-M-A¹-C-H-G-Z¹-Z-A- | | |
| | C-C3-C¹-G-C-G-Z-Z-Z¹-A¹-Z-A¹-G-C-G¹ | | |
| 4149-8_439 | Z-M-A¹-C-H-G-Z¹-Z-A-C-C3-C¹-G-C-G-Z-Z- | 3.5 | 708 |
| | Z¹-A¹-Z-A¹-G-C-G¹-H-Z-M-A¹-C-H-G-Z¹-Z- | | |
| | A-C-C3-C¹-G-C-G-Z-Z-Z¹-Z-A¹-G-C-G¹ | | |
| 4149-8_440 | Z-M-A¹-C-H-G-Z¹-Z-A-C-C3-C¹-G-C-G-Z-Z- | 1.4 | 709 |
| | Z¹-A¹-Z-A¹-G-C-G¹-H-H-Z-M-A¹-C-H-G-Z¹- | | |
| | Z-A-C-C3-C¹-G-C-G-Z-Z-Z¹-A¹-Z-A¹-G-C-G¹ | | |
| 4149-8_441 | Z-M-A¹-C-H-G-Z¹-Z-A-C-C3-C¹-G-C-G-Z-Z- | 0.78 | 710 |
| | Z¹-A¹-Z-A¹-G-C-G¹-H-H-H-Z-M-A¹-C-H-G- | | |
| | Z¹-Z-A-C-C3-C¹-G-C-G-Z-Z-Z¹-A¹-Z-A¹-G-C-G¹ | | |
| 4149-8_442 | Z-M-A¹-C-H-G-Z¹-Z-A-C-C3-C¹-G-C-G-Z-Z- | 0.51 | 711 |
| | Z¹-A¹-Z-A¹-G-C-G¹-H-H-H-H-Z-M-A¹-C-H- | | |
| | G-Z¹-Z-A-C-C3-C¹-G-C-G-Z-Z-Z¹-A¹-Z-A¹- | | |
| | G-C-G¹ | | |
| 4149-8_443 | Z-M-A¹-C-H-G-Z¹-Z-A-C-C3-C¹-G-C-G-Z-Z- | 0.25 | 712 |
| | Z¹-A¹-Z-A¹-G-C-G¹-H-H-H-H-H-Z-M-A¹- | | |
| | C-H-G-Z¹-Z-A-C-C3-C¹-G-C-G-Z-Z-Z¹-A¹-Z- | | |
| | A¹-G-C-G¹ | | |
| 4149-8_444 | Z-M-A¹-C-H-G-Z¹-Z-A-C-C3-C¹-G-C-G-Z-Z- | 0.61 | 713 |
| | Z¹-A¹-Z-A¹-G-C-G¹-H-H-H-H-H-H-Z-M-A¹- | | |
| | C-H-G-Z¹-Z-A-C-C3-C¹-G-C-G-Z-Z-Z¹-A¹-Z- | | |
| | A¹-G-C-G¹ | | |
| 4149-8_379D | Z-M-A¹-C-H-G-Z¹-Z-A-C-C3-C¹-G-C-G-Z-Z- | 11 | 714 |
| | Z¹-A¹-Z-A¹-G-C-G¹-G¹-C-G-A¹-Z-A¹-Z-Z- | | |
| | G-C-G-C¹-C3-C-A-Z-Z¹-G-H-C-A¹-M-Z | | |
| 4149-8_445 | Z-M-A¹-C-H-G-Z¹-Z-A-C-C3-C¹-G-C-G-Z-Z- | 1.1 | 715 |
| | Z¹-A¹-Z-A¹-G-C-G¹-H-H-G¹-C-G-A¹-Z-A¹-Z¹- | | |
| | Z-Z-G-C-G-C¹-CS-C-A-Z-Z¹-G-H-C-A¹-M-Z | | |
| 4149-8_446 | Z-M-A¹-C-H-G-Z¹-Z-A-C-C3-C¹-G-C-G-Z-Z- | 0.61 | 716 |
| | Z¹-A¹-Z-A¹-G-C-G¹-H-H-H-H-G¹-C-G-A¹-Z- | | |
| | A¹-Z¹-Z-Z-G-C-G-C¹-C3-C-A-Z-Z¹-G-H-C- | | |
| | A¹-M-Z | | |
| 4149-8_447 | Z-M-A¹-C-H-G-Z¹-Z-A-C-C3-C¹-G-C-G-Z-Z- | 0.88 | 717 |
| | Z¹-A¹-Z-A¹-G-C-G¹-H-H-H-H-H-H-G¹-C-G- | | |
| | A¹-Z-A¹-Z¹-Z-Z-G-C-G-C¹-C3-C-A-Z-Z¹-G- | | |
| | H-C-A¹-M-Z | | |
| 5169-4_134 | C-G-A-C-A-G-C-A-P-G-P-A-P-G-C-A-C-A- | 28 | 718 |
| | P-C-P-C-G-A-C-A-G-C-A-P-G-P-A-P-G-C- | | |
| | A-C-A-P-C-P | | |
| 5169-4_135 | C-G-A-C-A-G-C-A-P-G-P-A-P-G-C-A-C-A- | 9.3 | 719 |
| | P-C-P-H-C-G-A-C-A-G-C-A-P-G-P-A-P-G-C- | | |
| | A-C-A-P-C-P | | |
| 5169-4_136 | C-G-A-C-A-G-C-A-P-G-P-A-P-G-C-A-C-A- | 8.7 | 720 |
| | P-C-P-H-H-C-G-A-C-A-G-C-A-P-G-P-A-P-G- | | |
| | C-A-C-A-P-C-P | | |
| 5169-4_137 | C-G-A-C-A-G-C-A-P-G-P-A-P-G-C-A-C-A- | 5.1 | 721 |
| | P-C-P-H-H-H-C-G-A-C-A-G-C-A-P-G-P-A-P- | | |
| | G-C-A-C-A-P-C-P | | |
| 5169-4_138 | C-G-A-C-A-G-C-A-P-G-P-A-P-G-C-A-C-A- | 4.9 | 722 |
| | P-C-P-H-H-H-H-C-G-A-C-A-G-C-A-P-G-P- | | |
| | A-P-G-C-A-C-A-P-C-P | | |
| 5169-4_139 | C-G-A-C-A-G-C-A-P-G-P-A-P-G-C-A-C-A- | 3.6 | 723 |
| | P-C-P-H-H-H-H-H-C-G-A-C-A-G-C-A-P-G- | | |
| | P-A-P-G-C-A-C-A-P-C-P | | |
| 5169-4_140 | C-G-A-C-A-G-C-A-P-G-P-A-P-G-C-A-C-A- | 3.6 | 724 |
| | P-C-P-H-H-H-H-H-H-C-G-A-C-A-G-C-A-P- | | |
| | G-P-A-P-G-C-A-C-A-P-C-P | | |
| 5169-4_26D | C-G-A-C-A-G-C-A-P-G-P-A-P-G-C-A-C-A- | 11 | 725 |
| | P-C-P-P-C-P-A-C-A-C-G-P-A-P-G-P-A-C-G- | | |
| | A-C-A-G-C | | |
| 5169-4_141 | C-G-A-C-A-G-C-A-P-G-P-A-P-G-C-A-C-A- | 13 | 726 |
| | P-C-P-H-H-P-C-P-A-C-A-C-G-P-A-P-G-P-A- | | |
| | C-G-A-C-A-G-C | | |
| 5169-4_142 | C-G-A-C-A-G-C-A-P-G-P-A-P-G-C-A-C-A- | 5.5 | 727 |
| | P-C-P-H-H-H-H-P-C-P-A-C-A-C-G-P-A-P-G- | | |
| | P-A-C-G-A-C-A-G-C | | |
| 5169-4_143 | C-G-A-C-A-G-C-A-P-G-P-A-P-G-C-A-C-A- | 2.0 | 728 |
| | P-C-P-H-H-H-H-H-H-P-C-P-A-C-A-C-G-P-A- | | |
| | P-G-P-A-C-G-A-C-A-G-C | | |

TABLE 16
VEGF homodimers of 4867-31_192.

| Aptamer ID. | | | Seq. ID. |
|---|---|---|---|
| No. | Sequence (5′→ 3′) | Kᵢ (pM) | NO. |
| 4867-31_395 | C-C-G-P-P-C¹-A-A-G¹-P-G-C¹-P-P-G¹-P-A¹- | 6.8 | 729 |
| | G¹-G-A-P-P¹-P-A-A-A-P-G¹-G¹-C-C-G-P-P- | | |
| | C¹-A-A-G¹-P-G-C¹-P-P-G¹-P-A¹-G¹-G-A-P- | | |
| | P¹-P-A-A-A-P-G¹-G¹ | | |
| 4867-31_396 | C-C-G-P-P-C¹-A-A-G¹-P-G-C¹-P-P-G¹-P-A¹- | 50 | 730 |
| | G¹-G-A-P-P¹-P-A-A-A-P-G¹-G¹-H-C-C-G-P- | | |
| | P-C¹-A-A-G¹-P-G-C¹-P-P-G¹-P-A¹-G¹-G-A-P- | | |
| | P¹-P-A-A-A-P-G¹-G¹ | | |
| 4867-31_397 | C-C-G-P-P-C¹-A-A-G¹-P-G-C¹-P-P-G¹-P-A¹- | 43 | 731 |
| | G¹-G-A-P-P¹-P-A-A-A-P-G¹-G¹-H-H-C-C-G- | | |
| | P-P-C¹-A-A-G¹-P-G-C¹-P-P-G¹-P-A¹-G¹-G-A- | | |
| | P-P¹-P-A-A-A-P-G¹-G¹ | | |
| 4867-31_398 | C-C-G-P-P-C¹-A-A-G¹-P-G-C¹-P-P-G¹-P-A¹- | 29 | 732 |
| | G¹-G-A-P-P¹-P-A-A-A-P-G¹-G¹-H-H-H-C-C- | | |
| | G-P-P-C¹-A-A-G¹-P-G-C¹-P-P-G¹-P-A¹-G¹-G- | | |
| | A-P-P¹-P-A-A-A-P-G¹-G¹ | | |
| 4867-31_399 | C-C-G-P-P-C¹-A-A-G¹-P-G-C¹-P-P-G¹-P-A¹- | 22 | 733 |
| | G¹-G-A-P-P¹-P-A-A-A-P-G¹-G¹-H-H-H-H-C- | | |
| | C-G-P-P-C¹-A-A-G¹-P-G-C¹-P-P-G¹-P-A¹-G¹- | | |
| | G-A-P-P¹-P-A-A-A-P-G¹-G¹ | | |
| 4867-31_400 | C-C-G-P-P-C¹-A-A-G¹-P-G-C¹-P-P-G¹-P-A¹- | 14 | 734 |
| | G¹-G-A-P-P¹-P-A-A-A-P-G¹-G¹-H-H-H-H-H- | | |
| | C-C-G-P-P-C¹-A-A-G¹-P-G-C¹-P-P-G¹-P-A¹- | | |
| | G¹-G-A-P-P¹-P-A-A-A-P-G¹-G¹ | | |
| 4867-31_401 | C-C-G-P-P-C¹-A-A-G¹-P-G-C¹-P-P-G¹-P-A¹- | 21 | 735 |
| | G¹-G-A-P-P¹-P-A-A-A-P-G¹-G¹-H-H-H-H-H- | | |
| | H-C-C-G-P-P-C¹-A-A-G¹-P-G-C¹-P-P-G¹-P- | | |
| | A¹-G¹-G-A-P-P¹-P-A-A-A-P-G¹-G¹ | | |
| 4867-31_192D | C-C-G-P-P-C¹-A-A-G¹-P-G-C¹-P-P-G¹-P-A¹- | 32 | 736 |
| | G¹-G-A-P-P¹-P-A-A-A-P-G¹-G¹-G¹-G¹-P-A- | | |
| | A-A-P-P¹-P-A-G-G¹-A¹-P-G¹-P-P-C¹-G-P-G¹- | | |
| | A-A-C¹-P-P-G-C-C | | |
| 4867-31_402 | C-C-G-P-P-C¹-A-A-G¹-P-G-C¹-P-P-G¹-P-A¹- | 27 | 737 |
| | G¹-G-A-P-P¹-P-A-A-A-P-G¹-G¹-H-H-G¹-G¹- | | |
| | P-A-A-A-P-P¹-P-A-G-G¹-A¹-P-G¹-P-P-C¹-G- | | |
| | P-G¹-A-A-C¹-P-P-G-C-C | | |
| 4867-31_403 | C-C-G-P-P-C¹-A-A-G¹-P-G-C¹-P-P-G¹-P-A¹- | 20 | 738 |
| | G¹-G-A-P-P¹-P-A-A-A-P-G¹-G¹-H-H-H-H-G¹- | | |
| | G¹-P-A-A-A-P-P¹-P-A-G-G¹-A¹-P-G¹-P-P-C¹- | | |
| | G-P-G¹-A-A-C¹-P-P-G-C-C | | |
| 4867-31_404 | C-C-G-P-P-C¹-A-A-G¹-P-G-C¹-P-P-G¹-P-A¹- | 33 | 739 |
| | G¹-G-A-P-P¹-P-A-A-A-P-G¹-G¹-H-H-H-H-H- | | |
| | H-G¹-G¹-P-A-A-A-P-P¹-P-A-G-G¹-A¹-P-G¹-P- | | |
| | P-C¹-G-P-G¹-A-A-C¹-P-P-G-C-C | | |

TABLE 17
PDGF-VEGF aptamer constructs

| Aptamer ID. | | Seq. |
|---|---|---|
| No. | Sequence 5′→ 3′ | ID. NO. |
| 4149-8_313 | C-C-G-P-P-C-A-A-G-P-G-C-P-P-C3-P-A-C3-G-A-P-P-P-A-A-A-P-G-G-Z-Z-A¹-C-H-G-Z-Z-A- | 740 |
| | C-A¹-C¹-G-C-G-Z-Z-Z-A¹-Z-A¹-G-C | |
| 4149-8_314 | C-C-G-P-P-C-A-A-G-P-G-C-P-P-C3-P-A-C3-G-A-P-P-P-A-A-A-P-G-G-H-Z-Z-A¹-C-H-G-Z-Z- | 741 |
| | A-C-A¹-C¹-G-C-G-Z-Z-Z-A¹-Z-A¹-G-C | |
| 4149-8_315 | C-C-G-P-P-C-A-A-G-P-G-C-P-P-C3-P-A-C3-G-A-P-P-P-A-A-A-P-G-G-H-H-Z-Z-A¹-C-H-G-Z- | 742 |
| | Z-A-C-A¹-C¹-G-C-G-Z-Z-Z-A¹-Z-A¹-G-C | |
| 4149-8_316 | C-C-G-P-P-C-A-A-G-P-G-C-P-P-C3-P-A-C3-G-A-P-P-P-A-A-A-P-G-G-H-H-H-Z-Z-A¹-C-H-G- | 743 |
| | Z-Z-A-C-A¹-C¹-G-C-G-Z-Z-Z-A¹-Z-A¹-G-C | |
| 4149-8_317 | Z-Z-A¹-C-H-G-Z-Z-A-C-A¹-C¹-G-C-G-Z-Z-Z-A¹-Z-A¹-G-C-G¹-C-C-G-P-P-C-A-A-G-P-G-C-P-P- | 744 |
| | C3-P-A-C3-G-A-P-P-P-A-A-A-P-G | |
| 4149-8_318 | Z-Z-A¹-C-H-G-Z-Z-A-C-A¹-C¹-G-C-G-Z-Z-Z-A¹-Z-A¹-G-C-G¹-H-C-C-G-P-P-C-A-A-G-P-G-C- | 745 |
| | P-P-C3-P-A-C3-G-A-P-P-P-A-A-A-P-G | |
| 4149-8_319 | Z-Z-A¹-C-H-G-Z-Z-A-C-A¹-C¹-G-C-G-Z-Z-Z-A¹-Z-A¹-G-C-G¹-H-H-C-C-G-P-P-C-A-A-G-P-G- | 746 |
| | C-P-P-C3-P-A-C3-G-A-P-P-P-A-A-A-P-G | |
| 4149-8_320- | Z-Z-A¹-C-H-G-Z-Z-A-C-A¹-C¹-G-C-G-Z-Z-Z-A¹-Z-A¹-G-C-G¹-H-H-H-C-C-G-P-P-C-A-A-G-P- | 747 |
| | G-C-P-P-C3-P-A-C3-G-A-P-P-P-A-A-A-P-G | |

TABLE 18
Binding affinity and in vitro activity of PDGF-VEGF aptamer constructs.

| | | | Hs27 | | | |
|---|---|---|---|---|---|---|
| | | PDGF-BB | PDGFRβ | | | |
| | | | % Activity | PDGF-AB | VEGF | VEGF121 |
| Target | SeqID | Kd (M) | Remaining | Kd (M) | Kd (M) | Kd (M) |
| PDGF-BB | 4149-8_39 | 8.75E−11 | | 4.76E−11 | 1.00E−06 | 1.00E−06 |
| PDGF-BB | 4149-8_130 | 7.59E−11 | | 1.41E−10 | 1.00E−06 | 1.00E−06 |
| PDGF-BB | 4149-8_273 | 6.14E−11 | | 1.89E−10 | 1.00E−06 | 1.00E−06 |
| VEGF121 | 4867-31_51 | 1.26E−07 | | 1.48E−08 | 1.96E−10 | 7.28E−10 |
| VEGF121 | 4867-31_183 | 1.95E−07 | | 1.45E−08 | 1.38E−10 | 6.65E−10 |
| Both | 4149-8_313 | 9.33E−11 | 5% | 1.65E−10 | 2.58E−10 | 4.31E−09 |
| Both | 4149-8_314 | 1.36E−10 | 2% | 1.11E−10 | 1.43E−10 | 1.55E−09 |
| Both | 4149-8_315 | 1.19E−10 | 2% | 1.23E−10 | 8.60E−11 | 7.58E−10 |
| Both | 4149-8_316 | 8.97E−11 | 2% | 1.37E−10 | 1.57E−10 | 5.00E−10 |
| Both | 4149-8_317 | 6.38E−11 | 58% | | | 8.09E−11 |
| Both | 4149-8_318 | 4.31E−11 | 43% | 8.18E−11 | 2.70E−10 | 2.47E−09 |
| Both | 4149-8_319 | 2.42E−11 | 17% | 3.02E−11 | 1.25E−10 | 1.07E−09 |
| Both | 4149-8_320 | 1.50E−11 | 13% | 4.93E−11 | 7.68E−11 | 4.22E−10 |

TABLE 19
PDGF/VEGF aptamer construct 4149-8_401

| | | Seq. |
|---|---|---|
| Aptamer | | ID. |
| ID. No. | Sequence 5′→ 3′ | NO. |
| 4149-8_401 | Z-M-A¹-C-H-G-Z¹-Z-A-C-C3-C¹-G-C-G- | 748 |
| | Z-Z-Z¹-A¹-Z-A¹-G-C-G¹-H-H-H-C-C- | |
| | G-P-P-C¹-A-A-G¹-P-G-C¹-P-P-G¹-P- | |
| | A¹-G¹-G-A-P-P¹-P-A-A-A-P-G¹-G¹ | |

TABLE 20
Binding affinity of PDGF/VEGF aptamer construct 4149-8_401

| | | PDGF-BB | PDGF-AB | VEGF165 | VEGF121 |
|---|---|---|---|---|---|
| Target | Seq ID | Kd (M) | Kd (M) | Kd (M) | Kd (M) |
| Both | 4149-8_320 | 1.50E−11 | 4.93E−11 | 7.68E−11 | 4.22E−10 |
| Both | 4149-8_401 | 1.51E−11 | 1.93E−10 | 2.77E−10 | 3.74E−11 |

TABLE 21
Binding affinities of PDGF/VEGF aptamer constructs
comprising 4149-8_379 and 4867-31_192

| | | | |
|---|---|---|---|
| 4149-8_401 | PDGF_379 | HHH | VEGF_192 |
| 4149-8_408 | VEGF_192 | H | PDGF_379 |
| 4149-8_409 | VEGF_192 | HH | PDGF_379 |
| 4149-8_410 | VEGF_192 | HHH | PDGF_379 |
| 4149-8_411 | VEGF_192 | HHHH | PDGF_379 |
| 4149-8_412 | VEGF_192 | HHHHH | PDGF_379 |
| 4149-8_413 | VEGF_192 | HHHHHH | PDGF_379 |
| 4149-8_414 | PDGF_379 | HH | VEGF_192 |
| 4149-8_415 | PDGF_379 | HHHH | VEGF_192 |
| 4149-8_416 | PDGF_379 | HHHHH | VEGF_192 |
| 4149-8_417 | PDGF_379 | HHHHHH | VEGF_192 |

| | Kd (M) | | |
|---|---|---|---|
| Aptamer ID. No. | PDGF-BB | VEGF121 | VEGF165 |
| E10030 | 4.7E−11 | NB | NB |
| OH-4149-8_379 | 2.0E−11 | NB | NB |
| OH-4867-31_192 | 5.7E−08 | 2.3E−11 | 4.1E−11 |
| N-4149-8_401 | 5.6E−12 | 2.7E−11 | 2.5E−11 |
| OH-4149-8_408 | 4.3E−11 | 4.4E−11 | 4.1E−11 |
| OH-4149-8_409 | 6.0E−10 | 2.6E−11 | 2.9E−11 |
| OH-4149-8_410 | 2.0E−11 | 2.6E−11 | 3.3E−11 |
| OH-4149-8_411 | 7.2E−12 | 2.0E−11 | 4.5E−11 |
| OH-4149-8_412 | 8.6E−12 | 2.0E−11 | 4.5E−11 |
| OH-4149-8_413 | 1.0E−11 | 4.0E−11 | 6.3E−11 |
| OH-4149-8_414 | 1.0E−11 | 2.3E−11 | 5.1E−11 |
| OH-4149-8_415 | 8.1E−12 | 4.0E−11 | 3.0E−11 |
| OH-4149-8_416 | 8.9E−12 | 4.1E−11 | 3.0E−11 |
| OH-4149-8_417 | 1.1E−11 | 4.3E−11 | 6.5E−11 |

TABLE 22
Binding affinities of PDGF/VEGF aptamer constructs
comprising 5169-4_26 and 4867-31_192.

| | | | | Seq. |
|---|---|---|---|---|
| Aptamer | | K_{d} (nM) | K_{d} (nM) | ID. |
| ID. No. | Sequence (5′ →3′) | PDGF | VEGF121 | NO. |
| 5169-4_93 | C-C-G-P-P-C¹-A-A-G¹-P-G-C¹-P-P-G¹-P- | 0.00020 | 0.052 | 749 |
| | A¹-G¹-G-A-P-P¹-P-A-A-A-P-G¹-G¹-H-H-H- | | | |
| | H-H-H-C-G-A-C-A-G-C-A-P-G-P-A-P-G- | | | |
| | C-A-C-A-P-C-P | | | |
| 5169-4_94 | C-C-G-P-P-C¹-A-A-G¹-P-G-C¹-P-P-G¹-P- | 0.00050 | 0.066 | 750 |
| | A¹-G¹-G-A-P-P¹-P-A-A-A-P-G¹-G¹-H-H-H- | | | |
| | H-H-C-G-A-C-A-G-C-A-P-G-P-A-P-G-C- | | | |
| | A-C-A-P-C-P | | | |
| 5169-4_95 | C-C-G-P-P-C¹-A-A-G¹-P-G-C¹-P-P-G¹-P- | 0.0012 | 0.043 | 751 |
| | A¹-G¹-G-A-P-P¹-P-A-A-A-P-G¹-G¹-H-H-H- | | | |
| | H-C-G-A-C-A-G-C-A-P-G-P-A-P-G-C-A- | | | |
| | C-A-P-C-P | | | |
| 5169-4_96 | C-C-G-P-P-C¹-A-A-G¹-P-G-C¹-P-P-G¹-P- | 0.0045 | 0.076 | 752 |
| | A¹-G¹-G-A-P-P¹-P-A-A-A-P-G¹-G¹-H-H-H- | | | |
| | C-G-A-C-A-G-C-A-P-G-P-A-P-G-C-A-C- | | | |
| | A-P-C-P | | | |
| 5169-4_97 | C-C-G-P-P-C¹-A-A-G¹-P-G-C¹-P-P-G¹-P- | 0.0037 | 0.10 | 753 |
| | A¹-G¹-G-A-P-P¹-P-A-A-A-P-G¹-G¹-H-H-C- | | | |
| | G-A-C-A-G-C-A-P-G-P-A-P-G-C-A-C-A- | | | |
| | P-C-P | | | |
| 5169-4_98 | C-C-G-P-P-C¹-A-A-G¹-P-G-C¹-P-P-G¹-P- | 0.0053 | 0.14 | 754 |
| | A¹-G¹-G-A-P-P¹-P-A-A-A-P-G¹-G¹-H-C-G- | | | |
| | A-C-A-G-C-A-P-G-P-A-P-G-C-A-C-A-P- | | | |
| | C-P | | | |
| 5169-4_99 | C-G-A-C-A-G-C-A-P-G-P-A-P-G-C-A-C- | 0.0021 | 0.120 | 755 |
| | A-P-C-P-H-H-H-H-H-H-C-C-G-P-P-C¹-A- | | | |
| | A-G¹-P-G-C¹-P-P-G¹-P-A¹-G¹-G-A-P-P¹-P- | | | |
| | A-A-A-P-G¹-G¹ | | | |
| 5169-4_100 | C-G-A-C-A-G-C-A-P-G-P-A-P-G-C-A-C- | 0.0015 | 0.056 | 756 |
| | A-P-C-P-H-H-H-H-H-C-C-G-P-P-C¹-A-A- | | | |
| | G¹-P-G-C¹-P-P-G¹-P-A¹-G¹-G-A-P-P¹-P-A- | | | |
| | A-A-P-G¹-G¹ | | | |
| 5169-4_101 | C-G-A-C-A-G-C-A-P-G-P-A-P-G-C-A-C- | 0.00050 | 0.13 | 757 |
| | A-P-C-P-H-H-H-H-C-C-G-P-P-C¹-A-A-G¹- | | | |
| | P-G-C¹-P-P-G¹-P-A¹-G¹-G-A-P-P¹-P-A-A- | | | |
| | A-P-G¹-G¹ | | | |
| 5169-4_102 | C-G-A-C-A-G-C-A-P-G-P-A-P-G-C-A-C- | 0.011 | 0.14 | 758 |
| | A-P-C-P-H-H-H-C-C-G-P-P-C¹-A-A-G¹-P- | | | |
| | G-C¹-P-P-G¹-P-A¹-G¹-G-A-P-P¹-P-A-A-A- | | | |
| | P-G¹-G¹ | | | |
| 5169-4_103 | C-G-A-C-A-G-C-A-P-G-P-A-P-G-C-A-C- | 0.0061 | 0.12 | 759 |
| | A-P-C-P-H-H-C-C-G-P-P-C¹-A-A-G¹-P-G- | | | |
| | C¹-P-P-G¹-P-A¹-G¹-G-A-P-P¹-P-A-A-A-P- | | | |
| | G¹-G¹ | | | |
| 5169-4_104 | C-G-A-C-A-G-C-A-P-G-P-A-P-G-C-A-C- | 0.0046 | 0.28 | 760 |
| | A-P-C-P-H-C-C-G-P-P-C¹-A-A-G¹-P-G-C¹- | | | |
| | P-P-G¹-P-A¹-G¹-G-A-P-P¹-P-A-A-A-P-G¹- | | | |
| | G¹ | | | |

TABLE 23
Aptamers and aptamer constructs tested in Ocular PK Studies.

| Test | | | |
|---|---|---|---|
| Article | Sequence ID | Target(s) | PEG |
| SL1010 | 4867-31_192 | VEGF | 40 kDa |
| SL1011 | 4149-8_379 | PDGF | 40 kDa |
| SL1012 | 4149-8_401 | VEGF and PDGF | 20 kDa |
| SL1013 | 4149-8_401 | VEGF and PDGF | 40 kDa |

TABLE 24
Concentrations in the Vitreous Humor For Aptamer and Aptamer
Constructs in the Ocular Pharmacokinetic Studies.

| | EYE | SL1010 | SL1011 | SL1012 | SL1013 |
|---|---|---|---|---|---|
| Time Point | (OS or | Concentration | Concentration | Concentration | Concentration |
| (hours) | OD) | (μg/mL) | (μg/mL) | (μg/mL) | (μg/mL) |
| 2 | OS | 296 | 280 | 538 | 563 |
| 2 | OD | 296 | 298 | 682 | 634 |
| 24 | OS | 195 | 164 | 330 | 520 |
| 24 | OD | 198 | 165 | 433 | 493 |
| 48 | OS | 188 | 131 | 359 | 376 |
| 48 | OD | 207 | 116 | 267 | 336 |
| 96 | OS | 146 | 96.3 | 227 | 307 |
| 96 | OD | 139 | 97.8 | 204 | 277 |
| 192 | OS | 70.2 | 16.8 | 92.8 | 145 |
| 192 | OD | 82.4 | 18.2 | 67.8 | 132 |

OS—Oculus Sinister;
OD—Oculus Dexter

TABLE 25
Vitreous Humor Half-Life for Aptamer and Aptamer Constructs
Following a Single Bilateral Intravitreous Dose to NZW Rabbits.

| | Half-life | 95% Confidence |
|---|---|---|
| Test Article | (hours) | Interval |
| SL1010 | 105 | 90-128 |
| SL1011 | 47 | 42-55 |
| SL1012 | 69 | 58-85 |
| SL1013 | 92 | 81-106 |

TABLE 26
Phosphorothioate walk along aptamer 4867-31_192.

| Aptamer ID. | | SEQ ID | | Ratio to |
|---|---|---|---|---|
| No. | Sequence (5′→ 3′) | NO. | K_{d} (M) | parent |
| 4867-31_192 | C-C-G-P-P-C¹-A-A-G¹-P-G-C¹-P-P-G¹-P-A¹-G¹-G-A-P-P¹-P-A- | 706 | 1.1E−11 | 1 |
| | A-A-P-G¹-G¹ | | | |
| 4867-31_409 | C²-C-G-P-P-C¹-A-A-G¹-P-G-C¹-P-P-G¹-P-A¹-G¹-G-A-P-P¹-P- | 763 | 1.1E−11 | 0.97 |
| | A-A-A-P-G¹-G¹ | | | |
| 4867-31_410 | C-C²-G-P-P-C¹-A-A-G¹-P-G-C¹-P-P-G¹-P-A¹-G¹-G-A-P-P¹-P- | 764 | 1.6E−11 | 1.5 |
| | A-A-A-P-G¹-G¹ | | | |
| 4867-31_411 | C-C-G²-P-P-C¹-A-A-G¹-P-G-C¹-P-P-G¹-P-A¹-G¹-G-A-P-P¹-P- | 765 | 3.2E−07 | 29,259 |
| | A-A-A-P-G¹-G¹ | | | |
| 4867-31_412 | C-C-G-P²-P-C¹-A-A-G¹-P-G-C¹-P-P-G¹-P-A¹-G¹-G-A-P-P¹-P- | 766 | 2.2E−11 | 2.1 |
| | A-A-A-P-G¹-G¹ | | | |
| 4867-31_413 | C-C-G-P-P²-C¹-A-A-G¹-P-G-C¹-P-P-G¹-P-A¹-G¹-G-A-P-P¹-P- | 767 | 1.5E−11 | 1.4 |
| | A-A-A-P-G¹-G¹ | | | |
| 4867-31_414 | C-C-G-P-P-C¹-A²-A-G¹-P-G-C¹-P-P-G¹-P-A¹-G¹-G-A-P-P¹-P- | 768 | 1.5E−11 | 1.4 |
| | A-A-A-P-G¹-G¹ | | | |
| 4867-31_415 | C-C-G-P-P-C¹-A-A²-G¹-P-G-C¹-P-P-G¹-P-A¹-G¹-G-A-P-P¹-P- | 769 | 1.1E−11 | 1.0 |
| | A-A-A-P-G¹-G¹ | | | |
| 4867-31_416 | C-C-G-P-P-C¹-A-A-G¹-P²-G-C¹-P-P-G¹-P-A¹-G¹-G-A-P-P¹-P- | 770 | 9.3E−12 | 0.86 |
| | A-A-A-P-G¹-G¹ | | | |
| 4867-31_417 | C-C-G-P-P-C¹-A-A-G¹-P-G²-C¹-P-P-G¹-P-A¹-G¹-G-A-P-P¹-P- | 771 | 9.4E−12 | 0.87 |
| | A-A-A-P-G¹-G¹ | | | |
| 4867-31_419 | C-C-G-P-P-C¹-A-A-G¹-P-G-C¹-P²-P-G¹-P-A¹-G¹-G-A-P-P¹-P- | 772 | no data | no data |
| | A-A-A-P-G¹-G¹ | | | |
| 4867-31_420 | C-C-G-P-P-C¹-A-A-G¹-P-G-C¹-P-P²-G¹-P-A¹-G¹-G-A-P-P¹-P- | 773 | 1.8E−11 | 1.6 |
| | A-A-A-P-G¹-G¹ | | | |
| 4867-31_421 | C-C-G-P-P-C¹-A-A-G¹-P-G-C¹-P-P-G¹-P²-A¹-G¹-G-A-P-P¹-P- | 774 | 1.5E−11 | 1.4 |
| | A-A-A-P-G¹-G¹ | | | |
| 4867-31_422 | C-C-G-P-P-C¹-A-A-G¹-P-G-C¹-P-P-G¹-P-A¹-G¹-G²-A-P-P¹-P- | 775 | 9.5E−12 | 0.88 |
| | A-A-A-P-G¹-G¹ | | | |
| 4867-31_423 | C-C-G-P-P-C¹-A-A-G¹-P-G-C¹-P-P-G¹-P-A¹-G¹-G-A²-P-P¹-P- | 776 | 1.8E−11 | 1.7 |
| | A-A-A-P-G¹-G¹ | | | |
| 4867-31_424 | C-C-G-P-P-C¹-A-A-G¹-P-G-C¹-P-P-G¹-P-A¹-G¹-G-A-P²-P¹-P- | 777 | 1.1E−11 | 1.1 |
| | A-A-A-P-G¹-G¹ | | | |
| 4867-31_425 | C-C-G-P-P-C¹-A-A-G¹-P-G-C¹-P-P-G¹-P-A¹-G¹-G-A-P-P¹-P²- | 778 | 1.6E−11 | 1.5 |
| | A-A-A-P-G¹-G¹ | | | |
| 4867-31_426 | C-C-G-P-P-C¹-A-A-G¹-P-G-C¹-P-P-G¹-P-A¹-G¹-G-A-P-P¹-P- | 779 | 1.2E−11 | 1.1 |
| | A²-A-A-P-G¹-G¹ | | | |
| 4867-31_427 | C-C-G-P-P-C¹-A-A-G¹-P-G-C¹-P-P-G¹-P-A¹-G¹-G-A-P-P¹-P-A- | 780 | 8.1E−12 | 0.75 |
| | A²-A-P-G¹-G¹ | | | |
| 4867-31_428 | C-C-G-P-P-C¹-A-A-G¹-P-G-C¹-P-P-G¹-P-A¹-G¹-G-A-P-P¹-P-A- | 781 | 8.4E−12 | 0.78 |
| | A-A²-P-G¹-G¹ | | | |
| 4867-31_429 | C-C-G-P-P-C¹-A-A-G¹-P-G-C¹-P-P-G¹-P-A¹-G¹-G-A-P-P¹-P-A- | 782 | 1.2E−11 | 1.1 |
| | A-A-P²-G¹-G¹ | | | |
| 4867-31_438 | C-C-G-P-P-C^{1,2}-A-A-G¹-P-G-C¹-P-P-G¹-P-A¹-G¹-G-A-P-P¹-P- | 783 | 1.3E−11 | 1.2 |
| | A-A-A-P-G¹-G¹ | | | |
| 4867-31_439 | C-C-G-P-P-C¹-A-A-G^{1,2}-P-G-C¹-P-P-G¹-P-A¹-G¹-G-A-P-P¹-P- | 784 | 2.4E−11 | 2.2 |
| | A-A-A-P-G¹-G¹ | | | |
| 4867-31_440 | C-C-G-P-P-C¹-A-A-G¹-P-G-C^{1,2}-P-P-G¹-P-A¹-G¹-G-A-P-P¹-P- | 785 | 9.9E−12 | 0.91 |
| | A-A-A-P-G¹-G¹ | | | |
| 4867-31_441 | C-C-G-P-P-C¹-A-A-G¹-P-G-C¹-P-P-G^{1,2}-P-A¹-G¹-G-A-P-P¹-P- | 786 | 1.7E−11 | 1.6 |
| | A-A-A-P-G¹-G¹ | | | |
| 4867-31_442 | C-C-G-P-P-C¹-A-A-G¹-P-G-C¹-P-P-G¹-P-A^{1,2}-G¹-G-A-P-P¹-P- | 787 | 1.5E−11 | 1.4 |
| | A-A-A-P-G¹-G¹ | | | |
| 4867-31_443 | C-C-G-P-P-C¹-A-A-G¹-P-G-C¹-P-P-G¹-P-A¹-G^{1,2}-G-A-P-P¹-P- | 788 | 8.5E−12 | 0.79 |
| | A-A-A-P-G¹-G¹ | | | |
| 4867-31_444 | C-C-G-P-P-C¹-A-A-G¹-P-G-C¹-P-P-G¹-P-A¹-G¹-G-A-P-P¹-P-A- | 789 | 7.5E−12 | 0.70 |
| | A-A-P-G^{1,2}-G¹ | | | |
| 4867-31_445 | C-C-G-P-P-C¹-A-A-G¹-P-G-C¹-P-P-G¹-P-A¹-G¹-G-A-P-P¹-P-A- | 790 | 1.0E−11 | 0.96 |
| | A-A-P-G¹-G^{1,2} | | | |

TABLE 27
Sequences of the VEGF aptamers created in order to enhance
nuclease resistance. The binding dissociation constant (K_{d} values)
along with the number of 2′-OMe moieties (# OMe;
superscript “1” indicates that the nucleotide has a 2′-O-methyl)
and 3′-phosphorothioate linkages (# P═S; superscript
“2” indicates that the nucleotide has a phosphorothioate linkage)
are shown.

| | | SEQ | | | |
|---|---|---|---|---|---|
| Aptamer ID. | | ID | | | |
| No. | Sequence (5′→ 3′) | NO. | K_{d} (M) | # OMe | # P═S |
| 4867-31_192 | C-C-G-P-P-C¹-A-A-G¹-P-G-C¹-P-P-G¹-P-A¹-G¹-G- | 706 | 3.1E−11 | 9 | 0 |
| | A-P-P¹-P-A-A-A-P-G¹-G¹ | | | | |
| 4867-31_475 | C¹-C-G-P-P-C¹-A-A-G¹-P-G-C¹-P-P-G¹-P-A¹-G¹-G- | 791 | 2.6E−11 | 10 | 1 |
| | A-P-P¹-P-A-A²-A-P-G¹-G¹ | | | | |
| 4867-31_476 | C¹-C-G-P-P-C¹-A-A-G¹-P-G-C¹-P-P-G¹-P-A¹-G¹-G- | 792 | 2.1-11 | 10 | 1 |
| | A-P-P¹-P-A-A-A²-P-G¹-G¹ | | | | |
| 4867-31_477 | C¹-C-G-P-P-C¹-A-A-G¹-P-G-C¹-P-P-G¹-P-A¹-G¹-G- | 793 | 2.4E−11 | 10 | 2 |
| | A-P-P¹-P-A-A²-A²-P-G¹-G¹ | | | | |
| 4867-31_478 | C-C-G-P-P-C¹-A-A-G¹-P-G-C¹-P-P-G¹-P-A¹-G¹-G- | 794 | 1.9E−11 | 9 | 2 |
| | A-P-P¹-P-A-A²-A²-P-G¹-G¹ | | | | |
| 4867-31_479 | C¹-C-G-P-P-C¹-A-A-G¹-P-G-C¹-P-P-G¹-P-A¹-G¹-G- | 795 | 2.6E−11 | 10 | 1 |
| | A-P-P¹-P-A²-A-A-P-G¹-G¹ | | | | |
| 4867-31_480 | C¹-C-G-P-P-C¹-A-A-G¹-P-G-C¹-P-P-G¹-P-A¹-G¹-G- | 796 | 2.8E−11 | 10 | 2 |
| | A-P-P¹-P-A²-A²-A-P-G¹-G¹ | | | | |
| 4867-31_481 | C¹-C-G-P-P-C¹-A-A-G¹-P-G-C¹-P-P-G¹-P-A¹-G¹-G- | 797 | 2.6E−11 | 10 | 3 |
| | A-P-P¹-P-A²-A²-A²-P-G¹-G¹ | | | | |
| 4867-31_482 | C-C-G-P-P-C¹-A-A-G¹-P-G-C¹-P-P-G¹-P-A¹-G¹-G- | 798 | 2.4E−11 | 9 | 3 |
| | A-P-P¹-P-A²-A²-A²-P-G¹-G¹ | | | | |
| 4867-31_483 | C-C-G-P-P-C¹-A-A-G¹-P-G-C¹-P-P-G¹-P-A¹-G¹-G- | 799 | 3.2E−11 | 9 | 2 |
| | A-P-P¹-P-A²-A²-A-P-G¹-G¹ | | | | |

TABLE 28
A phosphorothioate walk along aptamers 5169-4_146.

| | | | | Ratio |
|---|---|---|---|---|
| Aptamer ID. | | SEQ ID | | to |
| No. | Sequence (5′→ 3′) | NO. | K_{d} (M) | parent |
| 5169-4_146 | C¹-G-A-C¹-A-G¹-C¹-A-P-G-P-A-P-G¹-C¹-A¹-C¹-A¹-P-C¹-P¹ | 545 | 1.5E−11 | 1.0 |
| 5169-4_150 | C¹-G²-A-C¹-A-G¹-C¹-A-P-G-P-A-P-G¹-C¹-A¹-C¹-A¹-P-C¹-P¹ | 800 | 1.3E−11 | 0.89 |
| 5169-4_151 | C¹-G-A²-C¹-A-G¹-C¹-A-P-G-P-A-P-G¹-C¹-A¹-C¹-A¹-P-C¹-P¹ | 801 | 6.0E−12 | 0.42 |
| 5169-4_152 | C¹-G-A-C¹-A²-G¹-C¹-A-P-G-P-A-P-G¹-C¹-A¹-C¹-A¹-P-C¹-P¹ | 802 | 1.5E−11 | 1.0 |
| 5169-4_153 | C¹-G-A-C¹-A-G¹-C¹-A²-P-G-P-A-P-G¹-C¹-A¹-C¹-A¹-P-C¹-P¹ | 803 | 1.3E−11 | 0.92 |
| 5169-4_154 | C¹-G-A-C¹-A-G¹-C¹-A-P²-G-P-A-P-G¹-C¹-A¹-C¹-A¹-P-C¹-P¹ | 804 | 2.6E−11 | 1.8 |
| 5169-4_155 | C¹-G-A-C¹-A-G¹-C¹-A-P-G²-P-A-P-G¹-C¹-A¹-C¹-A¹-P-C¹-P¹ | 805 | 6.9E−12 | 0.48 |
| 5169-4_156 | C¹-G-A-C¹-A-G¹-C¹-A-P-G-P²-A-P-G¹-C¹-A¹-C¹-A¹-P-C¹-P¹ | 806 | 7.8E−12 | 0.54 |
| 5169-4_157 | C¹-G-A-C¹-A-G¹-C¹-A-P-G-P-A²-P-G¹-C¹-A¹-C¹-A¹-P-C¹-P¹ | 807 | 1.8E−11 | 1.2 |
| 5169-4_158 | C¹-G-A-C¹-A-G¹-C¹-A-P-G-P-A-P²-G¹-C¹-A¹-C¹-A¹-P-C¹-P¹ | 808 | 1.9E−11 | 1.3 |
| 5169-4_159 | C¹-G-A-C¹-A-G¹-C¹-A-P-G-P-A-P-G¹-C¹-A¹-C¹-A¹-P²-C¹-P¹ | 809 | 1.5E−11 | 1.0 |
| 5169-4_172 | C^{1,2}-G-A-C¹-A-G¹-C¹-A-P-G-P-A-P-G¹-C¹-A¹-C¹-A¹-P-C¹-P¹ | 810 | 1.3E−11 | 0.90 |
| 5169-4_173 | C¹-G-A-C^{1,2}-A-G¹-C¹-A-P-G-P-A-P-G¹-C¹-A¹-C¹-A¹-P-C¹-P¹ | 811 | 9.1E−12 | 0.63 |
| 5169-4_174 | C¹-G-A-C¹-A-G¹-C^{1,2}-A-P-G-P-A-P-G¹-C¹-A¹-C¹-A¹-P-C¹-P¹ | 812 | 1.8E−11 | 1.2 |
| 5169-4_175 | C¹-G-A-C¹-A-G¹-C¹-A-P-G-P-A-P-G¹-C^{1,2}-A¹-C¹-A¹-P-C¹-P¹ | 813 | 6.9E−12 | 0.48 |
| 5169-4_176 | C¹-G-A-C¹-A-G¹-C¹-A-P-G-P-A-P-G¹-C¹-A¹-C^{1,2}-A¹-P-C¹-P¹ | 814 | 1.4E−11 | 0.93 |
| 5169-4_177 | C¹-G-A-C¹-A-G¹-C¹-A-P-G-P-A-P-G¹-C¹-A¹-C¹-A¹-P-C^{1,2}-P¹ | 815 | 7.2E−12 | 0.50 |
| 5169-4_178 | C¹-G-A-C¹-A-G^{1,2}-C¹-A-P-G-P-A-P-G¹-C¹-A¹-C¹-A¹-P-C¹-P¹ | 816 | 1.1E−11 | 0.76 |
| 5169-4_179 | C¹-G-A-C¹-A-G¹-C¹-A-P-G-P-A-P-G^{1,2}-C¹-A¹-C¹-A¹-P-C¹-P¹ | 817 | 7.7E−12 | 0.53 |
| 5169-4_180 | C¹-G-A-C¹-A-G¹-C¹-A-P-G-P-A-P-G¹-C¹-A^{1,2}-C¹-A¹-P-C¹-P¹ | 818 | 2.0E−11 | 1.4 |
| 5169-4_181 | C¹-G-A-C¹-A-G¹-C¹-A-P-G-P-A-P-G¹-C¹-A¹-C¹-A^{1,2}-P-C¹-P¹ | 819 | 2.1E−11 | 1.4 |

TABLE 29
Sequences of the PDGFBB aptamers created in order to enhance nuclease
resistance. The binding dissociation constant (K_{d} values) along with
the number of 2′-OMe moieties (# OMe; superscript “1”
indicates that the nucleotide has a 2′-O-methyl) and 3′-phosphorothioate
linkages (# P═S; superscript “2” indicates that the
nucleotide has a phosphorothioate linkage) are shown.

| Aptamer | | SEQ ID | | # | # |
|---|---|---|---|---|---|
| ID. No. | Sequence (5′→ 3′) | NO. | Kd (M) | OMe | P═S |
| 5169-4_146 | C¹-G-A-C¹-A-G¹-C¹-A-P-G-P-A-P-G¹-C¹-A¹-C¹-A¹-P- | 545 | 2.6E−11 | 11 | 0 |
| | C¹-P¹ | | | | |
| 5169-4_182 | C¹-G-A-C¹-A-G¹-C¹-A-P²-G²-P²-A²-P-G¹-C¹-A¹-C¹-A¹- | 820 | 3.9E−11 | 11 | 4 |
| | P-C¹-P¹ | | | | |
| 5169-4_188 | C¹-G-A-C^{1,2}-A-G¹-C¹-A-P²-G²-P²-A²-P-G¹-C¹-A¹-C¹- | 821 | 8.6E−12* | 11 | 5 |
| | A¹-P-C¹-P¹ | | | | |

*Ki value as determined using competition binding assay as described in Example 14.

TABLE 30
Sequences of the PDGF aptamers created in order to enhance nuclease resistance.
The binding dissociation constant (K_{d} values) along with the number of 2′-OMe
moieties (# OMe; superscript “1” indicates that the nucleotide has a
2′-O-methyl) and 3′-phosphorothioate linkages (# P═S; superscript
“2” indicates that the nucleotide has a phosphorothioate linkage) are shown.

| | | SEQ | | | |
|---|---|---|---|---|---|
| Aptamer | | ID | | | |
| ID. No. | Sequence (5′→ 3′) | NO. | K_{d} (M) | # OMe | # P═S |
| 4149-8_379 | Bn-M-A¹-C¹-H-G-Bn¹-Bn-A-C-V-C¹-G-C-G-Bn-Bn-Bn¹- | 306 | 1.6E−11 | 7 | 0 |
| | A¹-Bn-A¹-G-C-G¹ | | | | |
| 4149-8_453 | Bn-Bn-A¹-C-H-G-Bn¹-Bn-A²-C-V-C¹-G¹-C-G²-P²-Bn²- | 822 | 2.0E−12 | 8 | 4 |
| | Bn¹-A¹-Bn-A¹-G-C-G¹ | | | | |
| 4149-8_454 | Bn-Bn-A¹-C-H-G-Bn¹-Bn-A²-C-V-C¹-G-C-G²-P²-Bn²-Bn¹-A¹- | 823 | 1.3E−12 | 7 | 4 |
| | Bn-A¹-G-C-G¹ | | | | |
| 4149-8_455 | Bn-Bn-A¹-C-H-G-Bn¹-Bn²-A²-C-V-C¹-G¹-C-G²-P²-Bn²-Bn¹- | 824 | 1.7E−11 | 8 | 5 |
| | A¹-Bn-A¹-G-C-G¹ | | | | |
| 4149-8_456 | Bn-Bn-A¹-C-H-G-Bn¹-Bn²-A²-C-V-C¹-G-C-G²-P²-Bn²-Bn¹-A¹- | 825 | 2.7E−11 | 7 | 5 |
| | Bn-A¹-G-C-G¹ | | | | |
| 4149-8_457 | Bn-Bn-A¹-C²-H-G-Bn¹-Bn²-A²-C²-V-C¹-G¹-C-G²-P²- | 826 | 4.3E−11* | 7 | 5 |
| | Bn²-Bn^{1,2}-A¹-Bn-A¹-G-C-G¹ | | | | |
| 4149-8_458 | Bn-Bn-A¹-C²-H-G-Bn¹-Bn²-A²-C²-V-C¹-G¹-C²-G²-P²- | 827 | 4.6E−11* | 8 | 8 |
| | Bn²-Bn^{1,2}-A¹-Bn-A¹-G-C-G¹ | | | | |
| 4149-8_459 | Bn-Bn-A¹-C-H-G-Bn¹-Bn²-A²-C²-V-C¹-G¹-C-G²-P²-Bn²- | 828 | 1.3E−11* | 8 | 6 |
| | Bn¹-A¹-Bn-A¹-G-C-G¹ | | | | |

*Ki value as determined using competition binding assay as described in Example 14.

TABLE 31
Sequences of the PDGF aptamers created in order to enhance nuclease resistance.

| Aptamer ID. | | SEQ ID | |
|---|---|---|---|
| No. | Sequence (5′→ 3′) | NO. | K_{d} (M) |
| 4149-8_379 | Bn-M-A¹-C-H-G-Bn¹-Bn-A-C-V-C¹-G-C-G-Bn-Bn-Bn¹-A¹-Bn-A¹-G-C-G¹ | 306 | 5.2E−11 |
| 4149-8_391 | Bn-Bn-A¹-C-H-G-Bn-Bn-A²-C-V-C¹-G-C-G²-Bn-Bn-Bn¹-A¹-Bn-A¹-G-C-G¹ | 317 | 1.2E−11 |
| 4149-8_418 | Bn-M-A¹-C-H-G-Bn¹-Bn-A-C-V-C¹-G-C-G¹-Bn-Bn-Bn¹-A¹-Bn-A¹-G-C-G¹ | 330 | 2.1E−10 |
| 4149-8_419 | Bn-M-A¹-C-H-G-Bn¹-Bn-A-C-V-C¹-G-C-G¹-P-Bn-Bn¹-A¹-Bn-A¹-G-C-G¹ | 331 | 1.3E−9 |
| 4149-9_420 | Bn-M-A¹-C-H-G-Bn¹-Bn-A-C-V-C¹-G-C-G¹-i-Bn-Bn¹-A¹-Bn-A¹-G-C-G¹ | 829 | 1.4E−9 |
| 4149-8_421 | Bn-M-A¹-C-H-G-Bn¹-Bn-A-C-V-C¹-G¹-C-G-Bn-Bn-Bn¹-A¹-Bn-A¹-G-C-G¹ | 333 | 1.9E−11 |
| 4149-8_422 | Bn-M-A¹-C-H-G-Bn¹-Bn-A-C-V-C¹-G¹-C-G¹-Bn-Bn-Bn¹-A¹-Bn-A¹-G-C-G¹ | 334 | 2.7E−10 |
| 4149-8_423 | Bn-M-A¹-C-H-G-Bn¹-Bn-A-C-V-C¹-G¹-C-G-P-Bn-Bn¹-A¹-Bn-A¹-G-C-G¹ | 335 | 3.3E−11 |
| 4149-8_424 | Bn-M-A¹-C-H-G-Bn¹-Bn-A-C-V-C¹-G¹-C¹-G-Bn-Bn-Bn¹-A¹-Bn-A¹-G-C-G¹ | 336 | 6.6E−9 |
| 4149-8_425 | Bn-M-A¹-C-H-G-Bn¹-Bn-A¹-C-V-C¹-G-C-G-Bn-Bn-Bn¹-A¹-Bn-A¹-G-C-G¹ | 337 | 9.1E−10 |
| 4149-8_426 | Bn-M-A¹-C-H-G-Bn¹-Bn-A¹-C-V-C¹-G-C-G¹-Bn-Bn-Bn¹-A¹-Bn-A¹-G-C-G¹ | 409 | 4.2E−8 |
| 4149-8_431 | Bn-M-A¹-C-H-G-Bn¹-Bn-A²-C-V-C¹-G-C-G²-P-Bn²-Bn¹-A¹-Bn-A¹-G-C-G¹ | 338 | 4.3E−11 |
| 4149-8_432 | Bn-M-A¹-C-H-G-Bn¹-Bn-A²-C-V-C¹-G-C-G²-Bn-Bn²-Bn¹-A¹-Bn-A¹-G-C-G¹ | 339 | 2.9E−11 |
| 4149-8_433 | Bn-M-A¹-C-H-G-Bn¹-Bn-A²-C-V-C¹-G-C-G²-P-Bn-Bn¹-A¹-Bn-A¹-G-C-G¹ | 340 | 6.6E−11 |
| 4149-8_434 | Bn-M-A¹-C-H-G-Bn¹-Bn-A²-C-V-C¹-G-C-G²-Bn-Bn-Bn¹-A¹-Bn-A¹-G-C-G¹ | 341 | 3.2E−11 |
| 4149-8_435 | Bn-Bn-A¹-C-H-G-Bn¹-Bn-A²-C-V-C¹-G-C-G²-P-Bn²-Bn¹-A¹-Bn-A¹-G-C-G¹ | 342 | 1.6E−11 |
| 4149-8_436 | Bn-Bn-A¹-C-H-G-Bn¹-Bn-A²-C-V-C¹-G-C-G²-Bn-Bn²-Bn¹-A¹-Bn-A¹-G-C-G¹ | 343 | 7.7E−12 |
| 4149-8_437 | Bn-Bn-A¹-C-H-G-Bn¹-Bn-A²-C-V-C¹-G-C-G²-P-Bn-Bn¹-A¹-Bn-A¹-G-C-G¹ | 344 | 7.4E−12 |

What is claimed is:

1. A nucleic acid molecule comprising the nucleic sequence
5′-C¹-G-A-C^{1,2}-A-G¹-C¹-A-Z²-G²-Z²-A²-Z-G¹-C¹-A¹-C¹-A¹-Z-C¹-Z¹-3′ (SEQ ID NO: 833),
wherein,
C¹ is independently, for each occurrence, selected from the group consisting of a cytidine, a deoxycytidine and a 2′-O-methylcytidine;
C^{1,2} is independently, for each occurrence, selected from the group consisting of a cytidine, a cytidine comprising a phosphorothioate linkage, a deoxycytidine, a deoxycytidine comprising a phosphorothioate linkage, a 2′-O-methylcytidine and a 2′-O-methylcytidine comprising a phosphorothioate linkage;
G¹ is independently, for each occurrence, selected from the group consisting of a guanosine, a deoxyguanosine and a 2′-O-methylguanosine;
G² is independently, for each occurrence, selected from the group consisting of a guanosine, a guanosine comprising a phosphorothioate linkage, a deoxyguanosine and a deoxyguanosine comprising a phosphorothioate linkage;
Z¹ is independently, for each occurrence, selected from the group consisting of a uridine, a deoxyuridine, a 2′-O-methyluridine, a 5-(N-naphthylmethylcarboxyamide)-2′-deoxyuridine (NapdU) and a 5-(N-naphthylmethylcarboxyamide)-2′-deoxyuridine (NapdU) comprising a 2′-O-methyl group;
Z² is independently, for each occurrence, selected from the group consisting of a uridine, a uridine comprising a phosphorothioate linkage, a deoxyuridine, a deoxyuridine comprising a phosphorothioate linkage, a 5-(N-naphthylmethylcarboxyamide)-2′-deoxyuridine (NapdU) and a 5-(N-naphthylmethylcarboxyamide)-2′-deoxyuridine (NapdU) comprising a phosphorothioate linkage;
Z is independently, for each occurrence, selected from the group consisting of a uridine, a deoxyuridine and a 5-(N-naphthylmethylcarboxyamide)-2′-deoxyuridine (NapdU);
A¹ is independently, for each occurrence, selected from the group consisting of an adenosine, a deoxyadenosine and a 2′-O-methyladenosine;
A² is independently, for each occurrence, selected from the group consisting of an adenosine, an adenosine comprising a phosphorothioate linkage, a deoxyadenosine and a deoxyadenosine comprising a phosphorothioate linkage; and
wherein, the nucleic acid molecule comprises at least one, two, three, four or five phosphorothioate linkages.

2. The nucleic acid molecule of claim 31, wherein C^{1,2} is a 2′-O-methylcytidine comprising a phosphorothioate linkage.

3. The nucleic acid molecule of claim 31
wherein
Z¹ is a 5-(N-naphthylmethylcarboxyamide)-2′-deoxyuridine (NapdU) comprising a 2′-O-methyl group; and/or
Z² is a 5-(N-naphthylmethylcarboxyamide)-2′-deoxyuridine (NapdU) comprising a phosphorothioate linkage; and/or
Z is a 5-(N-naphthylmethylcarboxyamide)-2′-deoxyuridine (NapdU); and/or
C¹ is a 2′-O-methylcytidine; and/or
G¹ is a 2′-O-methylguanosine; and/or
G² is a deoxyguanosine comprising a phosphorothioate linkage; and/or
A¹ is a 2′-O-methyladenosine; and/or
A² is a deoxyadenosine comprising a phosphorothioate linkage.

The application's sequence listing, which the Patent Office published only in electronic form, follows.

SEQUENCE LISTING (845 sequences)

SEQ ID NO: 1 - DNA, 75 bp, Artificial Sequence
  Synthetic
  misc_feature (18)..(19): n is 5-(N-benzylcarboxyamide)-2'-deoxyuridine
  misc_feature (25)..(25): n is 5-(N-benzylcarboxyamide)-2'-deoxyuridine
  misc_feature (29)..(30): n is 5-(N-benzylcarboxyamide)-2'-deoxyuridine
  misc_feature (38)..(40): n is 5-(N-benzylcarboxyamide)-2'-deoxyuridine
  misc_feature (42)..(42): n is 5-(N-benzylcarboxyamide)-2'-deoxyuridine
  misc_feature (47)..(47): n is 5-(N-benzylcarboxyamide)-2'-deoxyuridine
  misc_feature (57)..(57): n is 5-(N-benzylcarboxyamide)-2'-deoxyuridine
cgccctcgtcccatctcnnacgacnacgnnacacgcgnnnanagcgncaacccgagngaacaccaaccgagaacg

SEQ ID NO: 2 - DNA, 50 bp, Artificial Sequence
  Synthetic
  misc_feature (6)..(7): n is 5-(N-benzylcarboxyamide)-2'-deoxyuridine
  misc_feature (13)..(13): n is 5-(N-benzylcarboxyamide)-2'-deoxyuridine
  misc_feature (17)..(18): n is 5-(N-benzylcarboxyamide)-2'-deoxyuridine
  misc_feature (26)..(28): n is 5-(N-benzylcarboxyamide)-2'-deoxyuridine
  misc_feature (30)..(30): n is 5-(N-benzylcarboxyamide)-2'-deoxyuridine
  misc_feature (35)..(35): n is 5-(N-benzylcarboxyamide)-2'-deoxyuridine
  misc_feature (45)..(45): n is 5-(N-benzylcarboxyamide)-2'-deoxyuridine
atctcnnacgacnacgnnacacgcgnnnanagcgncaacccgagngaaca

SEQ ID NO: 3 - DNA, 48 bp, Artificial Sequence
  Synthetic
  misc_feature (6)..(7): n is 5-(N-benzylcarboxyamide)-2'-deoxyuridine
  misc_feature (13)..(13): n is 5-(N-benzylcarboxyamide)-2'-deoxyuridine
  misc_feature (17)..(18): n is 5-(N-benzylcarboxyamide)-2'-deoxyuridine
  misc_feature (26)..(28): n is 5-(N-benzylcarboxyamide)-2'-deoxyuridine
  misc_feature (30)..(30): n is 5-(N-benzylcarboxyamide)-2'-deoxyuridine
  misc_feature (35)..(35): n is 5-(N-benzylcarboxyamide)-2'-deoxyuridine
  misc_feature (45)..(45): n is 5-(N-benzylcarboxyamide)-2'-deoxyuridine
atctcnnacgacnacgnnacacgcgnnnanagcgncaacccgagngaa

SEQ ID NO: 4 - DNA, 46 bp, Artificial Sequence
  Synthetic
  misc_feature (6)..(7): n is 5-(N-benzylcarboxyamide)-2'-deoxyuridine
  misc_feature (13)..(13): n is 5-(N-benzylcarboxyamide)-2'-deoxyuridine
  misc_feature (17)..(18): n is 5-(N-benzylcarboxyamide)-2'-deoxyuridine
  misc_feature (26)..(28): n is 5-(N-benzylcarboxyamide)-2'-deoxyuridine
  misc_feature (30)..(30): n is 5-(N-benzylcarboxyamide)-2'-deoxyuridine
  misc_feature (35)..(35): n is 5-(N-benzylcarboxyamide)-2'-deoxyuridine
  misc_feature (45)..(45): n is 5-(N-benzylcarboxyamide)-2'-deoxyuridine
atctcnnacgacnacgnnacacgcgnnnanagcgncaacccgagng

SEQ ID NO: 5 - DNA, 44 bp, Artificial Sequence
  Synthetic
  misc_feature (6)..(7): n is 5-(N-benzylcarboxyamide)-2'-deoxyuridine
  misc_feature (13)..(13): n is 5-(N-benzylcarboxyamide)-2'-deoxyuridine
  misc_feature (17)..(18): n is 5-(N-benzylcarboxyamide)-2'-deoxyuridine
  misc_feature (26)..(28): n is 5-(N-benzylcarboxyamide)-2'-deoxyuridine
  misc_feature (30)..(30): n is 5-(N-benzylcarboxyamide)-2'-deoxyuridine
  misc_feature (35)..(35): n is 5-(N-benzylcarboxyamide)-2'-deoxyuridine
atctcnnacgacnacgnnacacgcgnnnanagcgncaacccgag

SEQ ID NO: 6 - DNA, 42 bp, Artificial Sequence
  Synthetic
  misc_feature (6)..(7): n is 5-(N-benzylcarboxyamide)-2'-deoxyuridine
  misc_feature (13)..(13): n is 5-(N-benzylcarboxyamide)-2'-deoxyuridine
  misc_feature (17)..(18): n is 5-(N-benzylcarboxyamide)-2'-deoxyuridine
  misc_feature (26)..(28): n is 5-(N-benzylcarboxyamide)-2'-deoxyuridine
  misc_feature (30)..(30): n is 5-(N-benzylcarboxyamide)-2'-deoxyuridine
  misc_feature (35)..(35): n is 5-(N-benzylcarboxyamide)-2'-deoxyuridine
atctcnnacgacnacgnnacacgcgnnnanagcgncaacccg

SEQ ID NO: 7 - DNA, 40 bp, Artificial Sequence
  Synthetic
  misc_feature (6)..(7): n is 5-(N-benzylcarboxyamide)-2'-deoxyuridine
  misc_feature (13)..(13): n is 5-(N-benzylcarboxyamide)-2'-deoxyuridine
  misc_feature (17)..(18): n is 5-(N-benzylcarboxyamide)-2'-deoxyuridine
  misc_feature (26)..(28): n is 5-(N-benzylcarboxyamide)-2'-deoxyuridine
  misc_feature (30)..(30): n is 5-(N-benzylcarboxyamide)-2'-deoxyuridine
  misc_feature (35)..(35): n is 5-(N-benzylcarboxyamide)-2'-deoxyuridine
atctcnnacgacnacgnnacacgcgnnnanagcgncaacc

SEQ ID NO: 8 - DNA, 38 bp, Artificial Sequence
  Synthetic
  misc_feature (6)..(7): n is 5-(N-benzylcarboxyamide)-2'-deoxyuridine
  misc_feature (13)..(13): n is 5-(N-benzylcarboxyamide)-2'-deoxyuridine
  misc_feature (17)..(18): n is 5-(N-benzylcarboxyamide)-2'-deoxyuridine
  misc_feature (26)..(28): n is 5-(N-benzylcarboxyamide)-2'-deoxyuridine
  misc_feature (30)..(30): n is 5-(N-benzylcarboxyamide)-2'-deoxyuridine
  misc_feature (35)..(35): n is 5-(N-benzylcarboxyamide)-2'-deoxyuridine
atctcnnacgacnacgnnacacgcgnnnanagcgncaa

SEQ ID NO: 9 - DNA, 36 bp, Artificial Sequence
  Synthetic
  misc_feature (6)..(7): n is 5-(N-benzylcarboxyamide)-2'-deoxyuridine
  misc_feature (13)..(13): n is 5-(N-benzylcarboxyamide)-2'-deoxyuridine
  misc_feature (17)..(18): n is 5-(N-benzylcarboxyamide)-2'-deoxyuridine
  misc_feature (26)..(28): n is 5-(N-benzylcarboxyamide)-2'-deoxyuridine
  misc_feature (30)..(30): n is 5-(N-benzylcarboxyamide)-2'-deoxyuridine
  misc_feature (35)..(35): n is 5-(N-benzylcarboxyamide)-2'-deoxyuridine
atctcnnacgacnacgnnacacgcgnnnanagcgnc

SEQ ID NO: 10 - DNA, 48 bp, Artificial Sequence
  Synthetic
  misc_feature (4)..(5): n is 5-(N-benzylcarboxyamide)-2'-deoxyuridine
  misc_feature (11)..(11): n is 5-(N-benzylcarboxyamide)-2'-deoxyuridine
  misc_feature (15)..(16): n is 5-(N-benzylcarboxyamide)-2'-deoxyuridine
  misc_feature (24)..(26): n is 5-(N-benzylcarboxyamide)-2'-deoxyuridine
  misc_feature (28)..(28): n is 5-(N-benzylcarboxyamide)-2'-deoxyuridine
  misc_feature (33)..(33): n is 5-(N-benzylcarboxyamide)-2'-deoxyuridine
  misc_feature (43)..(43): n is 5-(N-benzylcarboxyamide)-2'-deoxyuridine
ctcnnacgacnacgnnacacgcgnnnanagcgncaacccgagngaaca

SEQ ID NO: 11 - DNA, 46 bp, Artificial Sequence
  Synthetic
  misc_feature (2)..(3): n is 5-(N-benzylcarboxyamide)-2'-deoxyuridine
  misc_feature (9)..(9): n is 5-(N-benzylcarboxyamide)-2'-deoxyuridine
  misc_feature (13)..(14): n is 5-(N-benzylcarboxyamide)-2'-deoxyuridine
  misc_feature (22)..(24): n is 5-(N-benzylcarboxyamide)-2'-deoxyuridine
  misc_feature (26)..(26): n is 5-(N-benzylcarboxyamide)-2'-deoxyuridine
  misc_feature (31)..(31): n is 5-(N-benzylcarboxyamide)-2'-deoxyuridine
  misc_feature (41)..(41): n is 5-(N-benzylcarboxyamide)-2'-deoxyuridine
cnnacgacnacgnnacacgcgnnnanagcgncaacccgagngaaca

SEQ ID NO: 12 - DNA, 44 bp, Artificial Sequence
  Synthetic
  misc_feature (1)..(1): n is 5-(N-benzylcarboxyamide)-2'-deoxyuridine
  misc_feature (7)..(7): n is 5-(N-benzylcarboxyamide)-2'-deoxyuridine
  misc_feature (11)..(12): n is 5-(N-benzylcarboxyamide)-2'-deoxyuridine
  misc_feature (20)..(22): n is 5-(N-benzylcarboxyamide)-2'-deoxyuridine
  misc_feature (24)..(24): n is 5-(N-benzylcarboxyamide)-2'-deoxyuridine
  misc_feature (29)..(29): n is 5-(N-benzylcarboxyamide)-2'-deoxyuridine
  misc_feature (39)..(39): n is 5-(N-benzylcarboxyamide)-2'-deoxyuridine
nacgacnacgnnacacgcgnnnanagcgncaacccgagngaaca

SEQ ID NO: 13 - DNA, 45 bp, Artificial Sequence
  Synthetic
  misc_feature (2)..(3): n is 5-(N-benzylcarboxyamide)-2'-deoxyuridine
  misc_feature (9)..(9): n is 5-(N-benzylcarboxyamide)-2'-deoxyuridine
  misc_feature (13)..(14): n is 5-(N-benzylcarboxyamide)-2'-deoxyuridine
  misc_feature (22)..(24): n is 5-(N-benzylcarboxyamide)-2'-deoxyuridine
  misc_feature (26)..(26): n is 5-(N-benzylcarboxyamide)-2'-deoxyuridine
  misc_feature (31)..(31): n is 5-(N-benzylcarboxyamide)-2'-deoxyuridine
  misc_feature (41)..(41): n is 5-(N-benzylcarboxyamide)-2'-deoxyuridine
cnnacgacnacgnnacacgcgnnnanagcgncaacccgagngaac

SEQ ID NO: 14 - DNA, 44 bp, Artificial Sequence
  Synthetic
  misc_feature (2)..(3): n is 5-(N-benzylcarboxyamide)-2'-deoxyuridine
  misc_feature (9)..(9): n is 5-(N-benzylcarboxyamide)-2'-deoxyuridine
  misc_feature (13)..(14): n is 5-(N-benzylcarboxyamide)-2'-deoxyuridine
  misc_feature (22)..(24): n is 5-(N-benzylcarboxyamide)-2'-deoxyuridine
  misc_feature (26)..(26): n is 5-(N-benzylcarboxyamide)-2'-deoxyuridine
  misc_feature (31)..(31): n is 5-(N-benzylcarboxyamide)-2'-deoxyuridine
  misc_feature (41)..(41): n is 5-(N-benzylcarboxyamide)-2'-deoxyuridine
cnnacgacnacgnnacacgcgnnnanagcgncaacccgagngaa

SEQ ID NO: 15 - DNA, 43 bp, Artificial Sequence
  Synthetic
  misc_feature (2)..(3): n is 5-(N-benzylcarboxyamide)-2'-deoxyuridine
  misc_feature (9)..(9): n is 5-(N-benzylcarboxyamide)-2'-deoxyuridine
  misc_feature (13)..(14): n is 5-(N-benzylcarboxyamide)-2'-deoxyuridine
  misc_feature (22)..(24): n is 5-(N-benzylcarboxyamide)-2'-deoxyuridine
  misc_feature (26)..(26): n is 5-(N-benzylcarboxyamide)-2'-deoxyuridine
  misc_feature (31)..(31): n is 5-(N-benzylcarboxyamide)-2'-deoxyuridine
  misc_feature (41)..(41): n is 5-(N-benzylcarboxyamide)-2'-deoxyuridine
cnnacgacnacgnnacacgcgnnnanagcgncaacccgagnga

SEQ ID NO: 16 - DNA, 42 bp, Artificial Sequence
  Synthetic
  misc_feature (2)..(3): n is 5-(N-benzylcarboxyamide)-2'-deoxyuridine
  misc_feature (9)..(9): n is 5-(N-benzylcarboxyamide)-2'-deoxyuridine
  misc_feature (13)..(14): n is 5-(N-benzylcarboxyamide)-2'-deoxyuridine
  misc_feature (22)..(24): n is 5-(N-benzylcarboxyamide)-2'-deoxyuridine
  misc_feature (26)..(26): n is 5-(N-benzylcarboxyamide)-2'-deoxyuridine
  misc_feature (31)..(31): n is 5-(N-benzylcarboxyamide)-2'-deoxyuridine
  misc_feature (41)..(41): n is 5-(N-benzylcarboxyamide)-2'-deoxyuridine
cnnacgacnacgnnacacgcgnnnanagcgncaacccgagng

SEQ ID NO: 17 - DNA, 41 bp, Artificial Sequence
  Synthetic
  misc_feature (2)..(3): n is 5-(N-benzylcarboxyamide)-2'-deoxyuridine
  misc_feature (9)..(9): n is 5-(N-benzylcarboxyamide)-2'-deoxyuridine
  misc_feature (13)..(14): n is 5-(N-benzylcarboxyamide)-2'-deoxyuridine
  misc_feature (22)..(24): n is 5-(N-benzylcarboxyamide)-2'-deoxyuridine
  misc_feature (26)..(26): n is 5-(N-benzylcarboxyamide)-2'-deoxyuridine
  misc_feature (31)..(31): n is 5-(N-benzylcarboxyamide)-2'-deoxyuridine
cnnacgacnacgnnacacgcgnnnanagcgncaacccgagt

SEQ ID NO: 18 - DNA, 40 bp, Artificial Sequence
  Synthetic
  misc_feature (2)..(3): n is 5-(N-benzylcarboxyamide)-2'-deoxyuridine
  misc_feature (9)..(9): n is 5-(N-benzylcarboxyamide)-2'-deoxyuridine
  misc_feature (13)..(14): n is 5-(N-benzylcarboxyamide)-2'-deoxyuridine
  misc_feature (22)..(24): n is 5-(N-benzylcarboxyamide)-2'-deoxyuridine
  misc_feature (26)..(26): n is 5-(N-benzylcarboxyamide)-2'-deoxyuridine
  misc_feature (31)..(31): n is 5-(N-benzylcarboxyamide)-2'-deoxyuridine
cnnacgacnacgnnacacgcgnnnanagcgncaacccgag

SEQ ID NO: 19 - DNA, 39 bp, Artificial Sequence
  Synthetic
  misc_feature (2)..(3): n is 5-(N-benzylcarboxyamide)-2'-deoxyuridine
  misc_feature (9)..(9): n is 5-(N-benzylcarboxyamide)-2'-deoxyuridine
  misc_feature (13)..(14): n is 5-(N-benzylcarboxyamide)-2'-deoxyuridine
  misc_feature (22)..(24): n is 5-(N-benzylcarboxyamide)-2'-deoxyuridine
  misc_feature (26)..(26): n is 5-(N-benzylcarboxyamide)-2'-deoxyuridine
  misc_feature (31)..(31): n is 5-(N-benzylcarboxyamide)-2'-deoxyuridine
cnnacgacnacgnnacacgcgnnnanagcgncaacccga

SEQ ID NO: 20 - DNA, 34 bp, Artificial Sequence
  Synthetic
  misc_feature (4)..(5): n is 5-(N-benzylcarboxyamide)-2'-deoxyuridine
  misc_feature (11)..(11): n is 5-(N-benzylcarboxyamide)-2'-deoxyuridine
  misc_feature (15)..(16): n is 5-(N-benzylcarboxyamide)-2'-deoxyuridine
  misc_feature (24)..(26): n is 5-(N-benzylcarboxyamide)-2'-deoxyuridine
  misc_feature (28)..(28): n is 5-(N-benzylcarboxyamide)-2'-deoxyuridine
  misc_feature (33)..(33): n is 5-(N-benzylcarboxyamide)-2'-deoxyuridine
ctcnnacgacnacgnnacacgcgnnnanagcgnc

SEQ ID NO: 21 - DNA, 32 bp, Artificial Sequence
  Synthetic
  misc_feature (2)..(3): n is 5-(N-benzylcarboxyamide)-2'-deoxyuridine
  misc_feature (9)..(9): n is 5-(N-benzylcarboxyamide)-2'-deoxyuridine
  misc_feature (13)..(14): n is 5-(N-benzylcarboxyamide)-2'-deoxyuridine
  misc_feature (22)..(24): n is 5-(N-benzylcarboxyamide)-2'-deoxyuridine
  misc_feature (26)..(26): n is 5-(N-benzylcarboxyamide)-2'-deoxyuridine
  misc_feature (31)..(31): n is 5-(N-benzylcarboxyamide)-2'-deoxyuridine
cnnacgacnacgnnacacgcgnnnanagcgnc

SEQ ID NO: 22 - DNA, 31 bp, Artificial Sequence
  Synthetic
  misc_feature (2)..(3): n is 5-(N-benzylcarboxyamide)-2'-deoxyuridine
  misc_feature (9)..(9): n is 5-(N-benzylcarboxyamide)-2'-deoxyuridine
  misc_feature (13)..(14): n is 5-(N-benzylcarboxyamide)-2'-deoxyuridine
  misc_feature (22)..(24): n is 5-(N-benzylcarboxyamide)-2'-deoxyuridine
  misc_feature (26)..(26): n is 5-(N-benzylcarboxyamide)-2'-deoxyuridine
cnnacgacnacgnnacacgcgnnnanagcgt

SEQ ID NO: 23 - DNA, 30 bp, Artificial Sequence
  Synthetic
  misc_feature (2)..(3): n is 5-(N-benzylcarboxyamide)-2'-deoxyuridine
  misc_feature (9)..(9): n is 5-(N-benzylcarboxyamide)-2'-deoxyuridine
  misc_feature (13)..(14): n is 5-(N-benzylcarboxyamide)-2'-deoxyuridine
  misc_feature (22)..(24): n is 5-(N-benzylcarboxyamide)-2'-deoxyuridine
  misc_feature (26)..(26): n is 5-(N-benzylcarboxyamide)-2'-deoxyuridine
cnnacgacnacgnnacacgcgnnnanagcg

SEQ ID NO: 24 - DNA, 29 bp, Artificial Sequence
  Synthetic
  misc_feature (2)..(3): n is 5-(N-benzylcarboxyamide)-2'-deoxyuridine
  misc_feature (9)..(9): n is 5-(N-benzylcarboxyamide)-2'-deoxyuridine
  misc_feature (13)..(14): n is 5-(N-benzylcarboxyamide)-2'-deoxyuridine
  misc_feature (22)..(24): n is 5-(N-benzylcarboxyamide)-2'-deoxyuridine
  misc_feature (26)..(26): n is 5-(N-benzylcarboxyamide)-2'-deoxyuridine
cnnacgacnacgnnacacgcgnnnanagc

SEQ ID NO: 25 - DNA, 28 bp, Artificial Sequence
  Synthetic
  misc_feature (2)..(3): n is 5-(N-benzylcarboxyamide)-2'-deoxyuridine
  misc_feature (9)..(9): n is 5-(N-benzylcarboxyamide)-2'-deoxyuridine
  misc_feature (13)..(14): n is 5-(N-benzylcarboxyamide)-2'-deoxyuridine
  misc_feature (22)..(24): n is 5-(N-benzylcarboxyamide)-2'-deoxyuridine
  misc_feature (26)..(26): n is 5-(N-benzylcarboxyamide)-2'-deoxyuridine
cnnacgacnacgnnacacgcgnnnanag

SEQ ID NO: 26 - DNA, 31 bp, Artificial Sequence
  Synthetic
  misc_feature (1)..(2): n is 5-(N-benzylcarboxyamide)-2'-deoxyuridine
  misc_feature (8)..(8): n is 5-(N-benzylcarboxyamide)-2'-deoxyuridine
  misc_feature (12)..(13): n is 5-(N-benzylcarboxyamide)-2'-deoxyuridine
  misc_feature (21)..(23): n is 5-(N-benzylcarboxyamide)-2'-deoxyuridine
  misc_feature (25)..(25): n is 5-(N-benzylcarboxyamide)-2'-deoxyuridine
  misc_feature (30)..(30): n is 5-(N-benzylcarboxyamide)-2'-deoxyuridine
nnacgacnacgnnacacgcgnnnanagcgnc

SEQ ID NO: 27 - DNA, 30 bp, Artificial Sequence
  Synthetic
  misc_feature (1)..(2): n is 5-(N-benzylcarboxyamide)-2'-deoxyuridine
  misc_feature (8)..(8): n is 5-(N-benzylcarboxyamide)-2'-deoxyuridine
  misc_feature (12)..(13): n is 5-(N-benzylcarboxyamide)-2'-deoxyuridine
  misc_feature (21)..(23): n is 5-(N-benzylcarboxyamide)-2'-deoxyuridine
  misc_feature (25)..(25): n is 5-(N-benzylcarboxyamide)-2'-deoxyuridine
nnacgacnacgnnacacgcgnnnanagcgt

SEQ ID NO: 28 - DNA, 29 bp, Artificial Sequence
  Synthetic
  misc_feature (1)..(2): n is 5-(N-benzylcarboxyamide)-2'-deoxyuridine
  misc_feature (8)..(8): n is 5-(N-benzylcarboxyamide)-2'-deoxyuridine
  misc_feature (12)..(13): n is 5-(N-benzylcarboxyamide)-2'-deoxyuridine
  misc_feature (21)..(23): n is 5-(N-benzylcarboxyamide)-2'-deoxyuridine
  misc_feature (25)..(25): n is 5-(N-benzylcarboxyamide)-2'-deoxyuridine
nnacgacnacgnnacacgcgnnnanagcg

SEQ ID NO: 29 - DNA, 28 bp, Artificial Sequence
  Synthetic
  misc_feature (1)..(2): n is 5-(N-benzylcarboxyamide)-2'-deoxyuridine
  misc_feature (8)..(8): n is 5-(N-benzylcarboxyamide)-2'-deoxyuridine
  misc_feature (12)..(13): n is 5-(N-benzylcarboxyamide)-2'-deoxyuridine
  misc_feature (21)..(23): n is 5-(N-benzylcarboxyamide)-2'-deoxyuridine
  misc_feature (25)..(25): n is 5-(N-benzylcarboxyamide)-2'-deoxyuridine
nnacgacnacgnnacacgcgnnnanagc

SEQ ID NO: 30 - DNA, 27 bp, Artificial Sequence
  Synthetic
  misc_feature (1)..(2): n is 5-(N-benzylcarboxyamide)-2'-deoxyuridine
  misc_feature (8)..(8): n is 5-(N-benzylcarboxyamide)-2'-deoxyuridine
  misc_feature (12)..(13): n is 5-(N-benzylcarboxyamide)-2'-deoxyuridine
  misc_feature (21)..(23): n is 5-(N-benzylcarboxyamide)-2'-deoxyuridine
  misc_feature (25)..(25): n is 5-(N-benzylcarboxyamide)-2'-deoxyuridine
nnacgacnacgnnacacgcgnnnanag

SEQ ID NO: 31 - DNA, 29 bp, Artificial Sequence
  Synthetic
  misc_feature (1)..(2): n is 5-(N-benzylcarboxyamide)-2'-deoxyuridine
  misc_feature (3)..(3): n is 2'-O-methyl-adenosine
  misc_feature (8)..(8): n is 5-(N-benzylcarboxyamide)-2'-deoxyuridine
  misc_feature (12)..(13): n is 5-(N-benzylcarboxyamide)-2'-deoxyuridine
  misc_feature (21)..(23): n is 5-(N-benzylcarboxyamide)-2'-deoxyuridine
  misc_feature (25)..(25): n is 5-(N-benzylcarboxyamide)-2'-deoxyuridine
nnncgacnacgnnacacgcgnnnanagcg

SEQ ID NO: 32 - DNA, 29 bp, Artificial Sequence
  Synthetic
  misc_feature (1)..(2): n is 5-(N-benzylcarboxyamide)-2'-deoxyuridine
  misc_feature (4)..(4): n is 2'-O-methyl-cytidine
  misc_feature (8)..(8): n is 5-(N-benzylcarboxyamide)-2'-deoxyuridine
  misc_feature (12)..(13): n is 5-(N-benzylcarboxyamide)-2'-deoxyuridine
  misc_feature (21)..(23): n is 5-(N-benzylcarboxyamide)-2'-deoxyuridine
  misc_feature (25)..(25): n is 5-(N-benzylcarboxyamide)-2'-deoxyuridine
nnangacnacgnnacacgcgnnnanagcg

SEQ ID NO: 33 - DNA, 29 bp, Artificial Sequence
  Synthetic
  misc_feature (1)..(2): n is 5-(N-benzylcarboxyamide)-2'-deoxyuridine
  misc_feature (5)..(5): n is 2'-O-methyl-guanosine
  misc_feature (8)..(8): n is 5-(N-benzylcarboxyamide)-2'-deoxyuridine
  misc_feature (12)..(13): n is 5-(N-benzylcarboxyamide)-2'-deoxyuridine
  misc_feature (21)..(23): n is 5-(N-benzylcarboxyamide)-2'-deoxyuridine
  misc_feature (25)..(25): n is 5-(N-benzylcarboxyamide)-2'-deoxyuridine
nnacnacnacgnnacacgcgnnnanagcg

SEQ ID NO: 34 - DNA, 29 bp, Artificial Sequence
  Synthetic
  misc_feature (1)..(2): n is 5-(N-benzylcarboxyamide)-2'-deoxyuridine
  misc_feature (6)..(6): n is 2'-O-methyl-adenosine
  misc_feature (8)..(8): n is 5-(N-benzylcarboxyamide)-2'-deoxyuridine
  misc_feature (12)..(13): n is 5-(N-benzylcarboxyamide)-2'-deoxyuridine
  misc_feature (21)..(23): n is 5-(N-benzylcarboxyamide)-2'-deoxyuridine
  misc_feature (25)..(25): n is 5-(N-benzylcarboxyamide)-2'-deoxyuridine
nnacgncnacgnnacacgcgnnnanagcg

SEQ ID NO: 35 - DNA, 29 bp, Artificial Sequence
  Synthetic
  misc_feature (1)..(2): n is 5-(N-benzylcarboxyamide)-2'-deoxyuridine
  misc_feature (7)..(7): n is 2'-O-methyl-cytidine
  misc_feature (8)..(8): n is 5-(N-benzylcarboxyamide)-2'-deoxyuridine
  misc_feature (12)..(13): n is 5-(N-benzylcarboxyamide)-2'-deoxyuridine
  misc_feature (21)..(23): n is 5-(N-benzylcarboxyamide)-2'-deoxyuridine
  misc_feature (25)..(25): n is 5-(N-benzylcarboxyamide)-2'-deoxyuridine
nnacgannacgnnacacgcgnnnanagcg

SEQ ID NO: 36 - DNA, 29 bp, Artificial Sequence
  Synthetic
  misc_feature (1)..(2): n is 5-(N-benzylcarboxyamide)-2'-deoxyuridine
  misc_feature (8)..(8): n is 5-(N-benzylcarboxyamide)-2'-deoxyuridine
  misc_feature (9)..(9): n is 2'-O-methyl-adenosine
  misc_feature (12)..(13): n is 5-(N-benzylcarboxyamide)-2'-deoxyuridine
  misc_feature (21)..(23): n is 5-(N-benzylcarboxyamide)-2'-deoxyuridine
  misc_feature (25)..(25): n is 5-(N-benzylcarboxyamide)-2'-deoxyuridine
nnacgacnncgnnacacgcgnnnanagcg

SEQ ID NO: 37 - DNA, 29 bp, Artificial Sequence
  Synthetic
  misc_feature (1)..(2): n is 5-(N-benzylcarboxyamide)-2'-deoxyuridine
  misc_feature (8)..(8): n is 5-(N-benzylcarboxyamide)-2'-deoxyuridine
  misc_feature (10)..(10): n is 2'-O-methyl-cytidine
  misc_feature (12)..(13): n is 5-(N-benzylcarboxyamide)-2'-deoxyuridine
  misc_feature (21)..(23): n is 5-(N-benzylcarboxyamide)-2'-deoxyuridine
  misc_feature (25)..(25): n is 5-(N-benzylcarboxyamide)-2'-deoxyuridine
nnacgacnangnnacacgcgnnnanagcg

SEQ ID NO: 38 - DNA, 29 bp, Artificial Sequence
  Synthetic
  misc_feature (1)..(2): n is 5-(N-benzylcarboxyamide)-2'-deoxyuridine
  misc_feature (8)..(8): n is 5-(N-benzylcarboxyamide)-2'-deoxyuridine
  misc_feature (11)..(11): n is 2'-O-methyl-guanosine
  misc_feature (12)..(13): n is 5-(N-benzylcarboxyamide)-2'-deoxyuridine
  misc_feature (21)..(23): n is 5-(N-benzylcarboxyamide)-2'-deoxyuridine
  misc_feature (25)..(25): n is 5-(N-benzylcarboxyamide)-2'-deoxyuridine
nnacgacnacnnnacacgcgnnnanagcg

SEQ ID NO: 39 - DNA, 29 bp, Artificial Sequence
  Synthetic
  misc_feature (1)..(2): n is 5-(N-benzylcarboxyamide)-2'-deoxyuridine
  misc_feature (8)..(8): n is 5-(N-benzylcarboxyamide)-2'-deoxyuridine
  misc_feature (12)..(13): n is 5-(N-benzylcarboxyamide)-2'-deoxyuridine
  misc_feature (14)..(14): n is 2'-O-methyl-adenosine
  misc_feature (21)..(23): n is 5-(N-benzylcarboxyamide)-2'-deoxyuridine
  misc_feature (25)..(25): n is 5-(N-benzylcarboxyamide)-2'-deoxyuridine
nnacgacnacgnnncacgcgnnnanagcg

SEQ ID NO: 40 - DNA, 29 bp, Artificial Sequence
  Synthetic
  misc_feature (1)..(2): n is 5-(N-benzylcarboxyamide)-2'-deoxyuridine
  misc_feature (8)..(8): n is 5-(N-benzylcarboxyamide)-2'-deoxyuridine
  misc_feature (12)..(13): n is 5-(N-benzylcarboxyamide)-2'-deoxyuridine
  misc_feature (15)..(15): n is 2'-O-methyl-cytidine
  misc_feature (21)..(23): n is 5-(N-benzylcarboxyamide)-2'-deoxyuridine
  misc_feature (25)..(25): n is 5-(N-benzylcarboxyamide)-2'-deoxyuridine
nnacgacnacgnnanacgcgnnnanagcg

SEQ ID NO: 41 - DNA, 29 bp, Artificial Sequence
  Synthetic
  misc_feature (1)..(2): n is 5-(N-benzylcarboxyamide)-2'-deoxyuridine
  misc_feature (8)..(8): n is 5-(N-benzylcarboxyamide)-2'-deoxyuridine
  misc_feature (12)..(13): n is 5-(N-benzylcarboxyamide)-2'-deoxyuridine
  misc_feature (16)..(16): n is 2'-O-methyl-adenosine
  misc_feature (21)..(23): n is 5-(N-benzylcarboxyamide)-2'-deoxyuridine
  misc_feature (25)..(25): n is 5-(N-benzylcarboxyamide)-2'-deoxyuridine
nnacgacnacgnnacncgcgnnnanagcg

SEQ ID NO: 42 - DNA, 29 bp, Artificial Sequence
  Synthetic
  misc_feature (1)..(2): n is 5-(N-benzylcarboxyamide)-2'-deoxyuridine
  misc_feature (8)..(8): n is 5-(N-benzylcarboxyamide)-2'-deoxyuridine
  misc_feature (12)..(13): n is 5-(N-benzylcarboxyamide)-2'-deoxyuridine
  misc_feature (17)..(17): n is 2'-O-methyl-cytidine
  misc_feature (21)..(23): n is 5-(N-benzylcarboxyamide)-2'-deoxyuridine
  misc_feature (25)..(25): n is 5-(N-benzylcarboxyamide)-2'-deoxyuridine
nnacgacnacgnnacangcgnnnanagcg

SEQ ID NO: 43 - DNA, 29 bp, Artificial Sequence
  Synthetic
  misc_feature (1)..(2): n is 5-(N-benzylcarboxyamide)-2'-deoxyuridine
  misc_feature (8)..(8): n is 5-(N-benzylcarboxyamide)-2'-deoxyuridine
  misc_feature (12)..(13): n is 5-(N-benzylcarboxyamide)-2'-deoxyuridine
  misc_feature (18)..(18): n is 2'-O-methyl-guanosine
  misc_feature (21)..(23): n is 5-(N-benzylcarboxyamide)-2'-deoxyuridine
  misc_feature (25)..(25): n is 5-(N-benzylcarboxyamide)-2'-deoxyuridine
nnacgacnacgnnacacncgnnnanagcg

SEQ ID NO: 44 - DNA, 29 bp, Artificial Sequence
  Synthetic
  misc_feature (1)..(2): n is 5-(N-benzylcarboxyamide)-2'-deoxyuridine
  misc_feature (8)..(8): n is 5-(N-benzylcarboxyamide)-2'-deoxyuridine
  misc_feature (12)..(13): n is 5-(N-benzylcarboxyamide)-2'-deoxyuridine
  misc_feature (19)..(19): n is 2'-O-methyl-cytidine
  misc_feature (21)..(23): n is 5-(N-benzylcarboxyamide)-2'-deoxyuridine
  misc_feature (25)..(25): n is 5-(N-benzylcarboxyamide)-2'-deoxyuridine
nnacgacnacgnnacacgngnnnanagcg

SEQ ID NO: 45 - DNA, 29 bp, Artificial Sequence
  Synthetic
  misc_feature (1)..(2): n is 5-(N-benzylcarboxyamide)-2'-deoxyuridine
  misc_feature (8)..(8): n is 5-(N-benzylcarboxyamide)-2'-deoxyuridine
  misc_feature (12)..(13): n is 5-(N-benzylcarboxyamide)-2'-deoxyuridine
  misc_feature (20)..(20): n is 2'-O-methyl-guanosine
  misc_feature (21)..(23): n is 5-(N-benzylcarboxyamide)-2'-deoxyuridine
  misc_feature (25)..(25): n is 5-(N-benzylcarboxyamide)-2'-deoxyuridine
nnacgacnacgnnacacgcnnnnanagcg

SEQ ID NO: 46 - DNA, 29 bp, Artificial Sequence
  Synthetic
  misc_feature (1)..(2): n is 5-(N-benzylcarboxyamide)-2'-deoxyuridine
  misc_feature (8)..(8): n is 5-(N-benzylcarboxyamide)-2'-deoxyuridine
  misc_feature (12)..(13): n is 5-(N-benzylcarboxyamide)-2'-deoxyuridine
  misc_feature (21)..(23): n is 5-(N-benzylcarboxyamide)-2'-deoxyuridine
  misc_feature (24)..(24): n is 2'-O-methyl-adenosine
  misc_feature (25)..(25): n is 5-(N-benzylcarboxyamide)-2'-deoxyuridine
nnacgacnacgnnacacgcgnnnnnagcg

SEQ ID NO: 47 - DNA, 29 bp, Artificial Sequence
  Synthetic
  misc_feature (1)..(2): n is 5-(N-benzylcarboxyamide)-2'-deoxyuridine
  misc_feature (8)..(8): n is 5-(N-benzylcarboxyamide)-2'-deoxyuridine
  misc_feature (12)..(13): n is 5-(N-benzylcarboxyamide)-2'-deoxyuridine
  misc_feature (21)..(23): n is 5-(N-benzylcarboxyamide)-2'-deoxyuridine
  misc_feature (25)..(25): n is 5-(N-benzylcarboxyamide)-2'-deoxyuridine
  misc_feature (26)..(26): n is 2'-O-methyl-adenosine
nnacgacnacgnnacacgcgnnnanngcg

SEQ ID NO: 48 - DNA, 29 bp, Artificial Sequence
  Synthetic
  misc_feature (1)..(2): n is 5-(N-benzylcarboxyamide)-2'-deoxyuridine
  misc_feature (8)..(8): n is 5-(N-benzylcarboxyamide)-2'-deoxyuridine
  misc_feature (12)..(13): n is 5-(N-benzylcarboxyamide)-2'-deoxyuridine
  misc_feature (21)..(23): n is 5-(N-benzylcarboxyamide)-2'-deoxyuridine
  misc_feature (25)..(25): n is 5-(N-benzylcarboxyamide)-2'-deoxyuridine
  misc_feature (27)..(27): n is 2'-O-methyl-guanosine
nnacgacnacgnnacacgcgnnnanancg

SEQ ID NO: 49 - DNA, 29 bp, Artificial Sequence
  Synthetic
  misc_feature (1)..(2): n is 5-(N-benzylcarboxyamide)-2'-deoxyuridine
  misc_feature (8)..(8): n is 5-(N-benzylcarboxyamide)-2'-deoxyuridine
  misc_feature (12)..(13): n is 5-(N-benzylcarboxyamide)-2'-deoxyuridine
  misc_feature (21)..(23): n is 5-(N-benzylcarboxyamide)-2'-deoxyuridine
  misc_feature (25)..(25): n is 5-(N-benzylcarboxyamide)-2'-deoxyuridine
  misc_feature (28)..(28): n is 2'-O-methyl-cytidine
nnacgacnacgnnacacgcgnnnanagng

SEQ ID NO: 50 - DNA, 29 bp, Artificial Sequence
  Synthetic
  misc_feature (1)..(2): n is 5-(N-benzylcarboxyamide)-2'-deoxyuridine
  misc_feature (8)..(8): n is 5-(N-benzylcarboxyamide)-2'-deoxyuridine
  misc_feature (12)..(13): n is 5-(N-benzylcarboxyamide)-2'-deoxyuridine
  misc_feature (21)..(23): n is 5-(N-benzylcarboxyamide)-2'-deoxyuridine
  misc_feature (25)..(25): n is 5-(N-benzylcarboxyamide)-2'-deoxyuridine
  misc_feature (29)..(29): n is 2'-O-methyl-guanosine
nnacgacnacgnnacacgcgnnnanagcn

SEQ ID NO: 51 - DNA, 29 bp, Artificial Sequence
  Synthetic
  misc_feature (1)..(1): n is 1,3-propane diol
  misc_feature (2)..(2): n is 5-(N-benzylcarboxyamide)-2'-deoxyuridine
  misc_feature (8)..(8): n is 5-(N-benzylcarboxyamide)-2'-deoxyuridine
  misc_feature (12)..(13): n is 5-(N-benzylcarboxyamide)-2'-deoxyuridine
  misc_feature (21)..(23): n is 5-(N-benzylcarboxyamide)-2'-deoxyuridine
  misc_feature (25)..(25): n is 5-(N-benzylcarboxyamide)-2'-deoxyuridine
nnacgacnacgnnacacgcgnnnanagcg

SEQ ID NO: 52 - DNA, 29 bp, Artificial Sequence
  Synthetic
  misc_feature (1)..(2): n is 5-(N-benzylcarboxyamide)-2'-deoxyuridine
  misc_feature (4)..(4): n is 1,3-propane diol
  misc_feature (8)..(8): n is 5-(N-benzylcarboxyamide)-2'-deoxyuridine
  misc_feature (12)..(13): n is 5-(N-benzylcarboxyamide)-2'-deoxyuridine
  misc_feature (21)..(23): n is 5-(N-benzylcarboxyamide)-2'-deoxyuridine
  misc_feature (25)..(25): n is 5-(N-benzylcarboxyamide)-2'-deoxyuridine
nnangacnacgnnacacgcgnnnanagcg

SEQ ID NO: 53 - DNA, 29 bp, Artificial Sequence
  Synthetic
  misc_feature (1)..(2): n is 5-(N-benzylcarboxyamide)-2'-deoxyuridine
  misc_feature (5)..(5): n is 1,3-propane diol
  misc_feature (8)..(8): n is 5-(N-benzylcarboxyamide)-2'-deoxyuridine
  misc_feature (12)..(13): n is 5-(N-benzylcarboxyamide)-2'-deoxyuridine
  misc_feature (21)..(23): n is 5-(N-benzylcarboxyamide)-2'-deoxyuridine
  misc_feature (25)..(25): n is 5-(N-benzylcarboxyamide)-2'-deoxyuridine
nnacnacnacgnnacacgcgnnnanagcg

SEQ ID NO: 54 - DNA, 29 bp, Artificial Sequence
  Synthetic
  misc_feature (1)..(2): n is 5-(N-benzylcarboxyamide)-2'-deoxyuridine
  misc_feature (6)..(6): n is 1,3-propane diol
  misc_feature (8)..(8): n is 5-(N-benzylcarboxyamide)-2'-deoxyuridine
  misc_feature (12)..(13): n is 5-(N-benzylcarboxyamide)-2'-deoxyuridine
  misc_feature (21)..(23): n is 5-(N-benzylcarboxyamide)-2'-deoxyuridine
  misc_feature (25)..(25): n is 5-(N-benzylcarboxyamide)-2'-deoxyuridine
nnacgncnacgnnacacgcgnnnanagcg

SEQ ID NO: 55 - DNA, 29 bp, Artificial Sequence
  Synthetic
  misc_feature (1)..(2): n is 5-(N-benzylcarboxyamide)-2'-deoxyuridine
  misc_feature (7)..(7): n is 1,3-propane diol
  misc_feature (8)..(8): n is 5-(N-benzylcarboxyamide)-2'-deoxyuridine
  misc_feature (12)..(13): n is 5-(N-benzylcarboxyamide)-2'-deoxyuridine
  misc_feature (21)..(23): n is 5-(N-benzylcarboxyamide)-2'-deoxyuridine
  misc_feature (25)..(25): n is 5-(N-benzylcarboxyamide)-2'-deoxyuridine
nnacgannacgnnacacgcgnnnanagcg

SEQ ID NO: 56 - DNA, 29 bp, Artificial Sequence
  Synthetic
  misc_feature (1)..(2): n is 5-(N-benzylcarboxyamide)-2'-deoxyuridine
  misc_feature (8)..(8): n is 1,3-propane diol
  misc_feature (12)..(13): n is 5-(N-benzylcarboxyamide)-2'-deoxyuridine
  misc_feature (21)..(23): n is 5-(N-benzylcarboxyamide)-2'-deoxyuridine
  misc_feature (25)..(25): n is 5-(N-benzylcarboxyamide)-2'-deoxyuridine
nnacgacnacgnnacacgcgnnnanagcg

SEQ ID NO: 57 - DNA, 29 bp, Artificial Sequence
  Synthetic
  misc_feature (1)..(2): n is 5-(N-benzylcarboxyamide)-2'-deoxyuridine
  misc_feature (8)..(8): n is 5-(N-benzylcarboxyamide)-2'-deoxyuridine
  misc_feature (9)..(9): n is 1,3-propane diol
  misc_feature (12)..(13): n is 5-(N-benzylcarboxyamide)-2'-deoxyuridine
  misc_feature (21)..(23): n is 5-(N-benzylcarboxyamide)-2'-deoxyuridine
  misc_feature (25)..(25): n is 5-(N-benzylcarboxyamide)-2'-deoxyuridine
nnacgacnncgnnacacgcgnnnanagcg

SEQ ID NO: 58 - DNA, 29 bp, Artificial Sequence
  Synthetic
  misc_feature (1)..(2): n is 5-(N-benzylcarboxyamide)-2'-deoxyuridine
  misc_feature (8)..(8): n is 5-(N-benzylcarboxyamide)-2'-deoxyuridine
  misc_feature (10)..(10): n is 1,3-propane diol
  misc_feature (12)..(13): n is 5-(N-benzylcarboxyamide)-2'-deoxyuridine
  misc_feature (21)..(23): n is 5-(N-benzylcarboxyamide)-2'-deoxyuridine
  misc_feature (25)..(25): n is 5-(N-benzylcarboxyamide)-2'-deoxyuridine
nnacgacnangnnacacgcgnnnanagcg

SEQ ID NO: 59 - DNA, 29 bp, Artificial Sequence
  Synthetic
  misc_feature (1)..(2): n is 5-(N-benzylcarboxyamide)-2'-deoxyuridine
  misc_feature (8)..(8): n is 5-(N-benzylcarboxyamide)-2'-deoxyuridine
  misc_feature (12)..(13): n is 5-(N-benzylcarboxyamide)-2'-deoxyuridine
  misc_feature (15)..(15): n is 1,3-propane diol
  misc_feature (21)..(23): n is 5-(N-benzylcarboxyamide)-2'-deoxyuridine
  misc_feature (25)..(25): n is 5-(N-benzylcarboxyamide)-2'-deoxyuridine
nnacgacnacgnnanacgcgnnnanagcg

SEQ ID NO: 60 - DNA, 29 bp, Artificial Sequence
  Synthetic
  misc_feature (1)..(2): n is 5-(N-benzylcarboxyamide)-2'-deoxyuridine
  misc_feature (8)..(8): n is 5-(N-benzylcarboxyamide)-2'-deoxyuridine
  misc_feature (12)..(13): n is 5-(N-benzylcarboxyamide)-2'-deoxyuridine
  misc_feature (16)..(16): n is 1,3-propane diol
  misc_feature (21)..(23): n is 5-(N-benzylcarboxyamide)-2'-deoxyuridine
  misc_feature (25)..(25): n is 5-(N-benzylcarboxyamide)-2'-deoxyuridine
nnacgacnacgnnacncgcgnnnanagcg

SEQ ID NO: 61 - DNA, 29 bp, Artificial Sequence
  Synthetic
  misc_feature (1)..(2): n is 5-(N-benzylcarboxyamide)-2'-deoxyuridine
  misc_feature (8)..(8): n is 5-(N-benzylcarboxyamide)-2'-deoxyuridine
  misc_feature (12)..(13): n is 5-(N-benzylcarboxyamide)-2'-deoxyuridine
  misc_feature (17)..(17): n is 1,3-propane diol
  misc_feature (21)..(23): n is 5-(N-benzylcarboxyamide)-2'-deoxyuridine
  misc_feature (25)..(25): n is 5-(N-benzylcarboxyamide)-2'-deoxyuridine
nnacgacnacgnnacangcgnnnanagcg

SEQ ID NO: 62 - DNA, 29 bp, Artificial Sequence
  Synthetic
  misc_feature (1)..(2): n is 5-(N-benzylcarboxyamide)-2'-deoxyuridine
  misc_feature (8)..(8): n is 5-(N-benzylcarboxyamide)-2'-deoxyuridine
  misc_feature (12)..(13): n is 5-(N-benzylcarboxyamide)-2'-deoxyuridine
  misc_feature (21)..(23): n is 5-(N-benzylcarboxyamide)-2'-deoxyuridine
  misc_feature (24)..(24): n is 1,3-propane diol
  misc_feature (25)..(25): n is 5-(N-benzylcarboxyamide)-2'-deoxyuridine
nnacgacnacgnnacacgcgnnnnnagcg

SEQ ID NO: 63 - DNA, 29 bp, Artificial Sequence
  Synthetic
  misc_feature (1)..(2): n is 5-(N-benzylcarboxyamide)-2'-deoxyuridine
  misc_feature (8)..(8): n is 5-(N-benzylcarboxyamide)-2'-deoxyuridine
  misc_feature (12)..(13): n is 5-(N-benzylcarboxyamide)-2'-deoxyuridine
  misc_feature (21)..(23): n is 5-(N-benzylcarboxyamide)-2'-deoxyuridine
  misc_feature (25)..(25): n is 5-(N-benzylcarboxyamide)-2'-deoxyuridine
  misc_feature (28)..(28): n is 1,3-propane diol
nnacgacnacgnnacacgcgnnnanagng

SEQ ID NO: 64 - DNA, 29 bp, Artificial Sequence
  Synthetic
  misc_feature (1)..(2): n is 5-(N-benzylcarboxyamide)-2'-deoxyuridine
  misc_feature (8)..(8): n is 5-(N-benzylcarboxyamide)-2'-deoxyuridine
  misc_feature (12)..(13): n is 5-(N-benzylcarboxyamide)-2'-deoxyuridine
  misc_feature (21)..(23): n is 5-(N-benzylcarboxyamide)-2'-deoxyuridine
  misc_feature (25)..(25): n is 5-(N-benzylcarboxyamide)-2'-deoxyuridine
  misc_feature (29)..(29): n is 1,3-propane diol
nnacgacnacgnnacacgcgnnnanagcn

SEQ ID NO: 65 - DNA, 29 bp, Artificial Sequence
  Synthetic
  misc_feature (1)..(2): n is 5-(N-benzylcarboxyamide)-2'-deoxyuridine
  misc_feature (3)..(3): n is 2'-O-methyl-adenosine
  misc_feature (6)..(6): n is 2'-O-methyl-adenosine
  misc_feature (8)..(8): n is 5-(N-benzylcarboxyamide)-2'-deoxyuridine
  misc_feature (9)..(9): n is 2'-O-methyl-adenosine
  misc_feature (12)..(13): n is 5-(N-benzylcarboxyamide)-2'-deoxyuridine
  misc_feature (16)..(16): n is 2'-O-methyl-adenosine
  misc_feature (18)..(18): n is 2'-O-methyl-guanosine
  misc_feature (21)..(23): n is 5-(N-benzylcarboxyamide)-2'-deoxyuridine
  misc_feature (24)..(24): n is 2'-O-methyl-adenosine
  misc_feature (25)..(25): n is 5-(N-benzylcarboxyamide)-2'-deoxyuridine
  misc_feature (26)..(26): n is 2'-O-methyl-adenosine
  misc_feature (27)..(27): n is 2'-O-methyl-guanosine
  misc_feature (28)..(28): n is 2'-O-methyl-cytidine
  misc_feature (29)..(29): n is 2'-O-methyl-guanosine
nnncgncnncgnnacncncgnnnnnnnnn

SEQ ID NO: 66 - DNA, 29 bp, Artificial Sequence
  Synthetic
  misc_feature (1)..(2): n is 5-(N-benzylcarboxyamide)-2'-deoxyuridine
  misc_feature (3)..(3): n is 2'-O-methyl-adenosine
  misc_feature (8)..(8): n is 5-(N-benzylcarboxyamide)-2'-deoxyuridine
  misc_feature (9)..(9): n is 2'-O-methyl-adenosine
  misc_feature (12)..(13): n is 5-(N-benzylcarboxyamide)-2'-deoxyuridine
  misc_feature (16)..(16): n is 2'-O-methyl-adenosine
  misc_feature (21)..(23): n is 5-(N-benzylcarboxyamide)-2'-deoxyuridine
  misc_feature (25)..(25): n is 5-(N-benzylcarboxyamide)-2'-deoxyuridine
  misc_feature (26)..(26): n is 2'-O-methyl-adenosine
  misc_feature (29)..(29): n is 2'-O-methyl-guanosine
nnncgacnncgnnacncgcgnnnanngcn

SEQ ID NO: 67 - DNA, 24 bp, Artificial Sequence
  Synthetic
  misc_feature (1)..(2): n is 5-(N-benzylcarboxyamide)-2'-deoxyuridine
  misc_feature (5)..(5): n is hexaethylene glycol
  misc_feature (7)..(8): n is 5-(N-benzylcarboxyamide)-2'-deoxyuridine
  misc_feature (16)..(18): n is 5-(N-benzylcarboxyamide)-2'-deoxyuridine
  misc_feature (20)..(20): n is 5-(N-benzylcarboxyamide)-2'-deoxyuridine
nnacngnnacacgcgnnnanagcg

SEQ ID NO: 68 - DNA, 25 bp, Artificial Sequence
  Synthetic
  misc_feature (1)..(2): n is 5-(N-benzylcarboxyamide)-2'-deoxyuridine
  misc_feature (5)..(6): n is hexaethylene glycol
  misc_feature (8)..(9): n is 5-(N-benzylcarboxyamide)-2'-deoxyuridine
  misc_feature (17)..(19): n is 5-(N-benzylcarboxyamide)-2'-deoxyuridine
  misc_feature (21)..(21): n is 5-(N-benzylcarboxyamide)-2'-deoxyuridine
nnacnngnnacacgcgnnnanagcg

SEQ ID NO: 69 - DNA, 26 bp, Artificial Sequence
  Synthetic
  misc_feature (1)..(2): n is 5-(N-benzylcarboxyamide)-2'-deoxyuridine
  misc_feature (6)..(6): n is hexaethylene glycol
  misc_feature (9)..(10): n is 5-(N-benzylcarboxyamide)-2'-deoxyuridine
  misc_feature (18)..(20): n is 5-(N-benzylcarboxyamide)-2'-deoxyuridine
  misc_feature (22)..(22): n is 5-(N-benzylcarboxyamide)-2'-deoxyuridine
nnacgncgnnacacgcgnnnanagcg

SEQ ID NO: 70 - DNA, 29 bp, Artificial Sequence
  Synthetic
  misc_feature (1)..(2): n is 5-(N-benzylcarboxyamide)-2'-deoxyuridine
  misc_feature (5)..(10): n is 1,3-propane diol
  misc_feature (12)..(13): n is 5-(N-benzylcarboxyamide)-2'-deoxyuridine
  misc_feature (21)..(23): n is 5-(N-benzylcarboxyamide)-2'-deoxyuridine
  misc_feature (25)..(25): n is 5-(N-benzylcarboxyamide)-2'-deoxyuridine
nnacnnnnnngnnacacgcgnnnanagcg

SEQ ID NO: 71 - DNA, 27 bp, Artificial Sequence
  Synthetic
  misc_feature (1)..(2): n is 5-(N-benzylcarboxyamide)-2'-deoxyuridine
  misc_feature (5)..(8): n is 1,3-propane diol
  misc_feature (10)..(11): n is 5-(N-benzylcarboxyamide)-2'-deoxyuridine
  misc_feature (19)..(21): n is 5-(N-benzylcarboxyamide)-2'-deoxyuridine
  misc_feature (23)..(23): n is 5-(N-benzylcarboxyamide)-2'-deoxyuridine
nnacnnnngnnacacgcgnnnanagcg

SEQ ID NO: 72 - DNA, 25 bp, Artificial Sequence
  Synthetic
  misc_feature (1)..(2): n is 5-(N-benzylcarboxyamide)-2'-deoxyuridine
  misc_feature (5)..(6): n is 1,3-propane diol
  misc_feature (8)..(9): n is 5-(N-benzylcarboxyamide)-2'-deoxyuridine
  misc_feature (17)..(19): n is 5-(N-benzylcarboxyamide)-2'-deoxyuridine
  misc_feature (21)..(21): n is 5-(N-benzylcarboxyamide)-2'-deoxyuridine
nnacnngnnacacgcgnnnanagcg

SEQ ID NO: 73 - DNA, 29 bp, Artificial Sequence
  Synthetic
  misc_feature (1)..(2): n is 5-(N-benzylcarboxyamide)-2'-deoxyuridine
  misc_feature (3)..(3): n is 2'-O-methyl-adenosine
  misc_feature (6)..(6): n is 1,3-propane diol
  misc_feature (8)..(9): n is 1,3-propane diol
  misc_feature (12)..(13): n is 5-(N-benzylcarboxyamide)-2'-deoxyuridine
  misc_feature (16)..(16): n is 2'-O-methyl-adenosine
  misc_feature (18)..(18): n is 2'-O-methyl-guanosine
  misc_feature (21)..(23): n is 5-(N-benzylcarboxyamide)-2'-deoxyuridine
  misc_feature (24)..(24): n is 2'-O-methyl-adenosine
  misc_feature (25)..(25): n is 5-(N-benzylcarboxyamide)-2'-deoxyuridine
  misc_feature (26)..(26): n is 2'-O-methyl-adenosine
  misc_feature (27)..(27): n is 2'-O-methyl-guanosine
  misc_feature (28)..(28): n is 2'-O-methyl-cytidine
  misc_feature (29)..(29): n is 2'-O-methyl-guanosine
nnncgncnncgnnacncncgnnnnnnnnn

SEQ ID NO: 74 - DNA, 29 bp, Artificial Sequence
  Synthetic
  misc_feature (1)..(1): n is 2'-O-methyl-uridine
  misc_feature (2)..(2): n is 5-(N-benzylcarboxyamide)-2'-deoxyuridine
  misc_feature (8)..(8): n is 5-(N-benzylcarboxyamide)-2'-deoxyuridine
  misc_feature (12)..(13): n is 5-(N-benzylcarboxyamide)-2'-deoxyuridine
  misc_feature (21)..(23): n is 5-(N-benzylcarboxyamide)-2'-deoxyuridine
  misc_feature (25)..(25): n is 5-(N-benzylcarboxyamide)-2'-deoxyuridine
nnacgacnacgnnacacgcgnnnanagcg

SEQ ID NO: 75 - DNA, 29 bp, Artificial Sequence
  Synthetic
  misc_feature (1)..(2): n is 5-(N-benzylcarboxyamide)-2'-deoxyuridine
  misc_feature (8)..(8): n is 2'-O-methyl-uridine
  misc_feature (12)..(13): n is 5-(N-benzylcarboxyamide)-2'-deoxyuridine
  misc_feature (21)..(23): n is 5-(N-benzylcarboxyamide)-2'-deoxyuridine
  misc_feature (25)..(25): n is 5-(N-benzylcarboxyamide)-2'-deoxyuridine
nnacgacnacgnnacacgcgnnnanagcg

SEQ ID NO: 76 - DNA, 29 bp, Artificial Sequence
  Synthetic
  misc_feature (1)..(2): n is 5-(N-benzylcarboxyamide)-2'-deoxyuridine
  misc_feature (8)..(8): n is 5-(N-benzylcarboxyamide)-2'-deoxyuridine
  misc_feature (12)..(12): n is 2'-O-methyl-uridine
  misc_feature (13)..(13): n is 5-(N-benzylcarboxyamide)-2'-deoxyuridine
  misc_feature (21)..(23): n is 5-(N-benzylcarboxyamide)-2'-deoxyuridine
  misc_feature (25)..(25): n is 5-(N-benzylcarboxyamide)-2'-deoxyuridine
nnacgacnacgnnacacgcgnnnanagcg

SEQ ID NO: 77 - DNA, 29 bp, Artificial Sequence
  Synthetic
  misc_feature (1)..(2): n is 5-(N-benzylcarboxyamide)-2'-deoxyuridine
  misc_feature (8)..(8): n is 5-(N-benzylcarboxyamide)-2'-deoxyuridine
  misc_feature (12)..(13): n is 5-(N-benzylcarboxyamide)-2'-deoxyuridine
  misc_feature (21)..(22): n is 5-(N-benzylcarboxyamide)-2'-deoxyuridine
  misc_feature (23)..(23): n is 2'-O-methyl-uridine
  misc_feature (25)..(25): n is 5-(N-benzylcarboxyamide)-2'-deoxyuridine
nnacgacnacgnnacacgcgnnnanagcg

SEQ ID NO: 78 - DNA, 29 bp, Artificial Sequence
  Synthetic
  misc_feature (1)..(1): n is 5-(N-benzylcarboxyamide)-2'-deoxyuridine
  misc_feature (2)..(2): n is 5-[N-(1-naphthylmethyl)carboxyamide]-2'-deoxyuridine
  misc_feature (8)..(8): n is 5-(N-benzylcarboxyamide)-2'-deoxyuridine
  misc_feature (12)..(13): n is 5-(N-benzylcarboxyamide)-2'-deoxyuridine
  misc_feature (21)..(23): n is 5-(N-benzylcarboxyamide)-2'-deoxyuridine
  misc_feature (25)..(25): n is 5-(N-benzylcarboxyamide)-2'-deoxyuridine
nnacgacnacgnnacacgcgnnnanagcg

SEQ ID NO: 79 - DNA, 29 bp, Artificial Sequence
  Synthetic
  misc_feature (1)..(2): n is 5-(N-benzylcarboxyamide)-2'-deoxyuridine
  misc_feature (8)..(8): n is 5-[N-(1-naphthylmethyl)carboxyamide]-2'-deoxyuridine
  misc_feature (12)..(13): n is 5-(N-benzylcarboxyamide)-2'-deoxyuridine
  misc_feature (21)..(23): n is 5-(N-benzylcarboxyamide)-2'-deoxyuridine
  misc_feature (25)..(25): n is 5-(N-benzylcarboxyamide)-2'-deoxyuridine
nnacgacnacgnnacacgcgnnnanagcg

SEQ ID NO: 80 - DNA, 29 bp, Artificial Sequence
  Synthetic
  misc_feature (1)..(2): n is 5-(N-benzylcarboxyamide)-2'-deoxyuridine
  misc_feature (8)..(8): n is 5-(N-benzylcarboxyamide)-2'-deoxyuridine
  misc_feature (12)..(12): n is 5-[N-(1-naphthylmethyl)carboxyamide]-2'-deoxyuridine
  misc_feature (13)..(13): n is 5-(N-benzylcarboxyamide)-2'-deoxyuridine
  misc_feature (21)..(23): n is 5-(N-benzylcarboxyamide)-2'-deoxyuridine
  misc_feature (25)..(25): n is 5-(N-benzylcarboxyamide)-2'-deoxyuridine
nnacgacnacgnnacacgcgnnnanagcg

SEQ ID NO: 81 - DNA, 29 bp, Artificial Sequence
  Synthetic
  misc_feature (1)..(2): n is 5-(N-benzylcarboxyamide)-2'-deoxyuridine
  misc_feature (8)..(8): n is 5-(N-benzylcarboxyamide)-2'-deoxyuridine
  misc_feature (12)..(12): n is 5-(N-benzylcarboxyamide)-2'-deoxyuridine
  misc_feature (13)..(13): n is 5-[N-(1-naphthylmethyl)carboxyamide]-2'-deoxyuridine
  misc_feature (21)..(23): n is 5-(N-benzylcarboxyamide)-2'-deoxyuridine
  misc_feature (25)..(25): n is 5-(N-benzylcarboxyamide)-2'-deoxyuridine
nnacgacnacgnnacacgcgnnnanagcg

SEQ ID NO: 82 - DNA, 29 bp, Artificial Sequence
  Synthetic
  misc_feature (1)..(2): n is 5-(N-benzylcarboxyamide)-2'-deoxyuridine
  misc_feature (8)..(8): n is 5-(N-benzylcarboxyamide)-2'-deoxyuridine
  misc_feature (12)..(13): n is 5-(N-benzylcarboxyamide)-2'-deoxyuridine
  misc_feature (21)..(21): n is 5-[N-(1-naphthylmethyl)carboxyamide]-2'-deoxyuridine
  misc_feature (22)..(23): n is 5-(N-benzylcarboxyamide)-2'-deoxyuridine
  misc_feature (25)..(25): n is 5-(N-benzylcarboxyamide)-2'-deoxyuridine
nnacgacnacgnnacacgcgnnnanagcg

SEQ ID NO: 83 - DNA, 29 bp, Artificial Sequence
  Synthetic
  misc_feature (1)..(2): n is 5-(N-benzylcarboxyamide)-2'-deoxyuridine
  misc_feature (8)..(8): n is 5-(N-benzylcarboxyamide)-2'-deoxyuridine
  misc_feature (12)..(13): n is 5-(N-benzylcarboxyamide)-2'-deoxyuridine
  misc_feature (21)..(21): n is 5-(N-benzylcarboxyamide)-2'-deoxyuridine
  misc_feature (22)..(22): n is 5-[N-(1-naphthylmethyl)carboxyamide]-2'-deoxyuridine
  misc_feature (23)..(23): n is 5-(N-benzylcarboxyamide)-2'-deoxyuridine
  misc_feature (25)..(25): n is 5-(N-benzylcarboxyamide)-2'-deoxyuridine
nnacgacnacgnnacacgcgnnnanagcg

SEQ ID NO: 84 - DNA, 29 bp, Artificial Sequence
  Synthetic
  misc_feature (1)..(2): n is 5-(N-benzylcarboxyamide)-2'-deoxyuridine
  misc_feature (8)..(8): n is 5-(N-benzylcarboxyamide)-2'-deoxyuridine
  misc_feature (12)..(13): n is 5-(N-benzylcarboxyamide)-2'-deoxyuridine
  misc_feature (21)..(22): n is 5-(N-benzylcarboxyamide)-2'-deoxyuridine
  misc_feature (23)..(23): n is 5-[N-(1-naphthylmethyl)carboxyamide]-2'-deoxyuridine
  misc_feature (25)..(25): n is 5-(N-benzylcarboxyamide)-2'-deoxyuridine
nnacgacnacgnnacacgcgnnnanagcg

SEQ ID NO: 85 - DNA, 29 bp, Artificial Sequence
  Synthetic
  misc_feature (1)..(2): n is 5-(N-benzylcarboxyamide)-2'-deoxyuridine
  misc_feature (8)..(8): n is 5-(N-benzylcarboxyamide)-2'-deoxyuridine
  misc_feature (12)..(13): n is 5-(N-benzylcarboxyamide)-2'-deoxyuridine
  misc_feature (21)..(23): n is 5-(N-benzylcarboxyamide)-2'-deoxyuridine
  misc_feature (25)..(25): n is 5-[N-(1-naphthylmethyl)carboxyamide]-2'-deoxyuridine
nnacgacnacgnnacacgcgnnnanagcg

SEQ ID NO: 86 - DNA, 29 bp, Artificial Sequence
  Synthetic
  misc_feature (1)..(1): n is 5-[N-(1-naphthylmethyl)carboxyamide]-2'-deoxyuridine
  misc_feature (2)..(2): n is 5-(N-benzylcarboxyamide)-2'-deoxyuridine
  misc_feature (8)..(8): n is 5-(N-benzylcarboxyamide)-2'-deoxyuridine
  misc_feature (12)..(13): n is 5-(N-benzylcarboxyamide)-2'-deoxyuridine
  misc_feature (21)..(23): n is 5-(N-benzylcarboxyamide)-2'-deoxyuridine
  misc_feature (25)..(25): n is 5-(N-benzylcarboxyamide)-2'-deoxyuridine
nnacgacnacgnnacacgcgnnnanagcg

SEQ ID NO: 87 - DNA, 29 bp, Artificial Sequence
  Synthetic
  misc_feature (1)..(2): n is 5-(N-benzylcarboxyamide)-2'-deoxyuridine
  misc_feature (8)..(8): n is 5-(N-benzylcarboxyamide)-2'-deoxyuridine
  misc_feature (12)..(13): n is 5-(N-benzylcarboxyamide)-2'-deoxyuridine
  misc_feature (21)..(23): n is 5-(N-benzylcarboxyamide)-2'-deoxyuridine
  misc_feature (25)..(25): n is 2'-O-methyl-uridine
nnacgacnacgnnacacgcgnnnanagcg

SEQ ID NO: 88 - DNA, 25 bp, Artificial Sequence
  Synthetic
  misc_feature (1)..(2): n is 5-(N-benzylcarboxyamide)-2'-deoxyuridine
  misc_feature (3)..(3): n is 2'-O-methyl-adenosine
  misc_feature (5)..(6): n is hexaethylene glycol
  misc_feature (8)..(9): n is 5-(N-benzylcarboxyamide)-2'-deoxyuridine
  misc_feature (12)..(12): n is 2'-O-methyl-adenosine
  misc_feature (17)..(19): n is 5-(N-benzylcarboxyamide)-2'-deoxyuridine
  misc_feature (21)..(21): n is 5-(N-benzylcarboxyamide)-2'-deoxyuridine
  misc_feature (22)..(22): n is 2'-O-methyl-adenosine
  misc_feature (25)..(25): n is 2'-O-methyl-guanosine
nnncnngnnacncgcgnnnanngcn

SEQ ID NO: 89 - DNA, 25 bp, Artificial Sequence
  Synthetic
  misc_feature (1)..(2): n is 5-(N-benzylcarboxyamide)-2'-deoxyuridine
  misc_feature (5)..(6): n is hexaethylene glycol
  misc_feature (8)..(9): n is 5-(N-benzylcarboxyamide)-2'-deoxyuridine
  misc_feature (17)..(17): n is 5-[N-(1-naphthylmethyl)carboxyamide]-2'-deoxyuridine
  misc_feature (18)..(19): n is 5-(N-benzylcarboxyamide)-2'-deoxyuridine
  misc_feature (21)..(21): n is 5-(N-benzylcarboxyamide)-2'-deoxyuridine
nnacnngnnacacgcgnnnanagcg

SEQ ID NO: 90 - DNA, 25 bp, Artificial Sequence
  Synthetic
  misc_feature (1)..(2): n is 5-(N-benzylcarboxyamide)-2'-deoxyuridine
  misc_feature (5)..(6): n is hexaethylene glycol
  misc_feature (8)..(8): n is 2'-O-methyl-uridine
  misc_feature (9)..(9): n is 5-(N-benzylcarboxyamide)-2'-deoxyuridine
  misc_feature (17)..(19): n is 5-(N-benzylcarboxyamide)-2'-deoxyuridine
  misc_feature (21)..(21): n is 5-(N-benzylcarboxyamide)-2'-deoxyuridine
nnacnngnnacacgcgnnnanagcg

SEQ ID NO: 91 - DNA, 25 bp, Artificial Sequence
  Synthetic
  misc_feature (1)..(2): n is 5-(N-benzylcarboxyamide)-2'-deoxyuridine
  misc_feature (3)..(3): n is 2'-O-methyl-adenosine
  misc_feature (5)..(6): n is hexaethylene glycol
  misc_feature (8)..(8): n is 2'-O-methyl-uridine
  misc_feature (9)..(9): n is 5-(N-benzylcarboxyamide)-2'-deoxyuridine
  misc_feature (12)..(12): n is 2'-O-methyl-adenosine
  misc_feature (17)..(17): n is 5-[N-(1-naphthylmethyl)carboxyamide]-2'-deoxyuridine
  misc_feature (18)..(19): n is 5-(N-benzylcarboxyamide)-2'-deoxyuridine
  misc_feature (21)..(21): n is 5-(N-benzylcarboxyamide)-2'-deoxyuridine
  misc_feature (22)..(22): n is 2'-O-methyl-adenosine
  misc_feature (25)..(25): n is 2'-O-methyl-guanosine
nnncnngnnacncgcgnnnanngcn

SEQ ID NO: 92 - DNA, 25 bp, Artificial Sequence
  Synthetic
  misc_feature (1)..(1): n is 5-(N-benzylcarboxyamide)-2'-deoxyuridine
  misc_feature (2)..(2): n is 5-[N-(1-naphthylmethyl)carboxyamide]-2'-deoxyuridine
  misc_feature (3)..(3): n is 2'-O-methyl-adenosine
  misc_feature (5)..(6): n is hexaethylene glycol
  misc_feature (8)..(9): n is 5-[N-(1-naphthylmethyl)carboxyamide]-2'-deoxyuridine
  misc_feature (12)..(12): n is 2'-O-methyl-adenosine
  misc_feature (17)..(18): n is 5-[N-(1-naphthylmethyl)carboxyamide]-2'-deoxyuridine
  misc_feature (19)..(19): n is 5-(N-benzylcarboxyamide)-2'-deoxyuridine
  misc_feature (21)..(21): n is 5-[N-(1-naphthylmethyl)carboxyamide]-2'-deoxyuridine
  misc_feature (22)..(22): n is 2'-O-methyl-adenosine
  misc_feature (25)..(25): n is 2'-O-methyl-guanosine
nnncnngnnacncgcgnnnanngcn

SEQ ID NO: 93 - DNA, 24 bp, Artificial Sequence
  Synthetic
  misc_feature (1)..(2): n is 5-(N-benzylcarboxyamide)-2'-deoxyuridine
  misc_feature (3)..(3): n is 2'-O-methyl-adenosine
  misc_feature (5)..(5): n is hexaethylene glycol
  misc_feature (7)..(8): n is 5-(N-benzylcarboxyamide)-2'-deoxyuridine
  misc_feature (11)..(11): n is 2'-O-methyl-adenosine
  misc_feature (16)..(18): n is 5-(N-benzylcarboxyamide)-2'-deoxyuridine
  misc_feature (20)..(20): n is 5-(N-benzylcarboxyamide)-2'-deoxyuridine
  misc_feature (21)..(21): n is 2'-O-methyl-adenosine
  misc_feature (24)..(24): n is 2'-O-methyl-guanosine
nnncngnnacncgcgnnnanngcn

SEQ ID NO: 94 - DNA, 24 bp, Artificial Sequence
  Synthetic
  misc_feature (1)..(2): n is 5-(N-benzylcarboxyamide)-2'-deoxyuridine
  misc_feature (5)..(5): n is hexaethylene glycol
  misc_feature (7)..(8): n is 5-(N-benzylcarboxyamide)-2'-deoxyuridine
  misc_feature (16)..(16): n is 5-[N-(1-naphthylmethyl)carboxyamide]-2'-deoxyuridine
  misc_feature (17)..(18): n is 5-(N-benzylcarboxyamide)-2'-deoxyuridine
  misc_feature (20)..(20): n is 5-(N-benzylcarboxyamide)-2'-deoxyuridine
nnacngnnacacgcgnnnanagcg

SEQ ID NO: 95 - DNA, 24 bp, Artificial Sequence
  Synthetic
  misc_feature (1)..(2): n is 5-(N-benzylcarboxyamide)-2'-deoxyuridine
  misc_feature (5)..(5): n is hexaethylene glycol
  misc_feature (7)..(7): n is 2'-O-methyl-uridine
  misc_feature (8)..(8): n is 5-(N-benzylcarboxyamide)-2'-deoxyuridine
  misc_feature (16)..(18): n is 5-(N-benzylcarboxyamide)-2'-deoxyuridine
  misc_feature (20)..(20): n is 5-(N-benzylcarboxyamide)-2'-deoxyuridine
nnacngnnacacgcgnnnanagcg

SEQ ID NO: 96 - DNA, 24 bp, Artificial Sequence
  Synthetic
  misc_feature (1)..(2): n is 5-(N-benzylcarboxyamide)-2'-deoxyuridine
  misc_feature (3)..(3): n is 2'-O-methyl-adenosine
  misc_feature (5)..(5): n is hexaethylene glycol
  misc_feature (7)..(7): n is 2'-O-methyl-uridine
  misc_feature (8)..(8): n is 5-(N-benzylcarboxyamide)-2'-deoxyuridine
  misc_feature (11)..(11): n is 2'-O-methyl-adenosine
  misc_feature (16)..(16): n is 5-[N-(1-naphthylmethyl)carboxyamide]-2'-deoxyuridine
  misc_feature (17)..(18): n is 5-(N-benzylcarboxyamide)-2'-deoxyuridine
  misc_feature (20)..(20): n is 5-(N-benzylcarboxyamide)-2'-deoxyuridine
  misc_feature (21)..(21): n is 2'-O-methyl-adenosine
  misc_feature (24)..(24): n is 2'-O-methyl-guanosine
nnncngnnacncgcgnnnanngcn

SEQ ID NO: 97 - DNA, 24 bp, Artificial Sequence
  Synthetic
  misc_feature (1)..(1): n is 5-[N-(phenyl-2-ethyl)-carboxyamide]-2'-deoxyuridine
  misc_feature (2)..(2): n is 5-(N-benzylcarboxyamide)-2'-deoxyuridine
  misc_feature (3)..(3): n is 2'-O-methyl-adenosine
  misc_feature (5)..(5): n is hexaethylene glycol
  misc_feature (7)..(8): n is 5-(N-benzylcarboxyamide)-2'-deoxyuridine
  misc_feature (11)..(11): n is 2'-O-methyl-adenosine
  misc_feature (16)..(18): n is 5-(N-benzylcarboxyamide)-2'-deoxyuridine
  misc_feature (20)..(20): n is 5-(N-benzylcarboxyamide)-2'-deoxyuridine
  misc_feature (21)..(21): n is 2'-O-methyl-adenosine
  misc_feature (24)..(24): n is 2'-O-methyl-guanosine
nnncngnnacncgcgnnnanngcn

SEQ ID NO: 98 - DNA, 24 bp, Artificial Sequence
  Synthetic
  misc_feature (1)..(1): n is 5-(N-benzylcarboxyamide)-2'-deoxyuridine
  misc_feature (2)..(2): n is 5-[N-(phenyl-2-ethyl)-carboxyamide]-2'-deoxyuridine
  misc_feature (3)..(3): n is 2'-O-methyl-adenosine
  misc_feature (5)..(5): n is hexaethylene glycol
  misc_feature (7)..(8): n is 5-(N-benzylcarboxyamide)-2'-deoxyuridine
  misc_feature (11)..(11): n is 2'-O-methyl-adenosine
  misc_feature (16)..(18): n is 5-(N-benzylcarboxyamide)-2'-deoxyuridine
  misc_feature (20)..(20): n is 5-(N-benzylcarboxyamide)-2'-deoxyuridine
  misc_feature (21)..(21): n is 2'-O-methyl-adenosine
  misc_feature (24)..(24): n is 2'-O-methyl-guanosine
nnncngnnacncgcgnnnanngcn

SEQ ID NO: 99 - DNA, 24 bp, Artificial Sequence
  Synthetic
  misc_feature (1)..(2): n is 5-(N-benzylcarboxyamide)-2'-deoxyuridine
  misc_feature (3)..(3): n is 2'-O-methyl-adenosine
  misc_feature (5)..(5): n is hexaethylene glycol
  misc_feature (7)..(7): n is 5-[N-(phenyl-2-ethyl)-carboxyamide]-2'-deoxyuridine
  misc_feature (8)..(8): n is 5-(N-benzylcarboxyamide)-2'-deoxyuridine
  misc_feature (11)..(11): n is 2'-O-methyl-adenosine
  misc_feature (16)..(18): n is 5-(N-benzylcarboxyamide)-2'-deoxyuridine
  misc_feature (20)..(20): n is 5-(N-benzylcarboxyamide)-2'-deoxyuridine
  misc_feature (21)..(21): n is 2'-O-methyl-adenosine
  misc_feature (24)..(24): n is 2'-O-methyl-guanosine
nnncngnnacncgcgnnnanngcn

SEQ ID NO: 100 - DNA, 24 bp, Artificial Sequence
  Synthetic
  misc_feature (1)..(2): n is 5-(N-benzylcarboxyamide)-2'-deoxyuridine
  misc_feature (3)..(3): n is 2'-O-methyl-adenosine
  misc_feature (5)..(5): n is hexaethylene glycol
  misc_feature (7)..(7): n is 5-(N-benzylcarboxyamide)-2'-deoxyuridine
  misc_feature (8)..(8): n is 5-[N-(phenyl-2-ethyl)-carboxyamide]-2'-deoxyuridine
  misc_feature (11)..(11): n is 2'-O-methyl-adenosine
  misc_feature (16)..(18): n is 5-(N-benzylcarboxyamide)-2'-deoxyuridine
  misc_feature (20)..(20): n is 5-(N-benzylcarboxyamide)-2'-deoxyuridine
  misc_feature (21)..(21): n is 2'-O-methyl-adenosine
  misc_feature (24)..(24): n is 2'-O-methyl-guanosine
nnncngnnacncgcgnnnanngcn

SEQ ID NO: 101 - DNA, 24 bp, Artificial Sequence
  Synthetic
  misc_feature (1)..(2): n is 5-(N-benzylcarboxyamide)-2'-deoxyuridine
  misc_feature (3)..(3): n is 2'-O-methyl-adenosine
  misc_feature (5)..(5): n is hexaethylene glycol
  misc_feature (7)..(8): n is 5-(N-benzylcarboxyamide)-2'-deoxyuridine
  misc_feature (11)..(11): n is 2'-O-methyl-adenosine
  misc_feature (16)..(16): n is 5-[N-(phenyl-2-ethyl)-carboxyamide]-2'-deoxyuridine
  misc_feature (17)..(18): n is 5-(N-benzylcarboxyamide)-2'-deoxyuridine
  misc_feature (20)..(20): n is 5-(N-benzylcarboxyamide)-2'-deoxyuridine
  misc_feature (21)..(21): n is 2'-O-methyl-adenosine
  misc_feature (24)..(24): n is 2'-O-methyl-guanosine
nnncngnnacncgcgnnnanngcn

SEQ ID NO: 102 - DNA, 24 bp, Artificial Sequence
  Synthetic
  misc_feature (1)..(2): n is 5-(N-benzylcarboxyamide)-2'-deoxyuridine
  misc_feature (3)..(3): n is 2'-O-methyl-adenosine
  misc_feature (5)..(5): n is hexaethylene glycol
  misc_feature (7)..(8): n is 5-(N-benzylcarboxyamide)-2'-deoxyuridine
  misc_feature (11)..(11): n is 2'-O-methyl-adenosine
  misc_feature (16)..(16): n is 5-(N-benzylcarboxyamide)-2'-deoxyuridine
  misc_feature (17)..(17): n is 5-[N-(phenyl-2-ethyl)-carboxyamide]-2'-deoxyuridine
  misc_feature (18)..(18): n is 5-(N-benzylcarboxyamide)-2'-deoxyuridine
  misc_feature (20)..(20): n is 5-(N-benzylcarboxyamide)-2'-deoxyuridine
  misc_feature (21)..(21): n is 2'-O-methyl-adenosine
  misc_feature (24)..(24): n is 2'-O-methyl-guanosine
nnncngnnacncgcgnnnanngcn

SEQ ID NO: 103 - DNA, 24 bp, Artificial Sequence
  Synthetic
  misc_feature (1)..(2): n is 5-(N-benzylcarboxyamide)-2'-deoxyuridine
  misc_feature (3)..(3): n is 2'-O-methyl-adenosine
  misc_feature (5)..(5): n is hexaethylene glycol
  misc_feature (7)..(8): n is 5-(N-benzylcarboxyamide)-2'-deoxyuridine
  misc_feature (11)..(11): n is 2'-O-methyl-adenosine
  misc_feature (16)..(17): n is 5-(N-benzylcarboxyamide)-2'-deoxyuridine
  misc_feature (18)..(18): n is 5-[N-(phenyl-2-ethyl)-carboxyamide]-2'-deoxyuridine
  misc_feature (20)..(20): n is 5-(N-benzylcarboxyamide)-2'-deoxyuridine
  misc_feature (21)..(21): n is 2'-O-methyl-adenosine
  misc_feature (24)..(24): n is 2'-O-methyl-guanosine
nnncngnnacncgcgnnnanngcn

SEQ ID NO: 104 - DNA, 24 bp, Artificial Sequence
  Synthetic
  misc_feature (1)..(2): n is 5-(N-benzylcarboxyamide)-2'-deoxyuridine
  misc_feature (3)..(3): n is 2'-O-methyl-adenosine
  misc_feature (5)..(5): n is hexaethylene glycol
  misc_feature (7)..(8): n is 5-(N-benzylcarboxyamide)-2'-deoxyuridine
  misc_feature (11)..(11): n is 2'-O-methyl-adenosine
  misc_feature (16)..(18): n is 5-(N-benzylcarboxyamide)-2'-deoxyuridine
  misc_feature (20)..(20): n is 5-[N-(phenyl-2-ethyl)-carboxyamide]-2'-deoxyuridine
  misc_feature (21)..(21): n is 2'-O-methyl-adenosine
  misc_feature (24)..(24): n is 2'-O-methyl-guanosine
nnncngnnacncgcgnnnanngcn

SEQ ID NO: 105 - DNA, 24 bp, Artificial Sequence
  Synthetic
  misc_feature (1)..(1): n is 5-[N-(3-benzo[b]thiophene-2-ethyl)carboxyamide]-2'-deoxyuridine
  misc_feature (2)..(2): n is 5-(N-benzylcarboxyamide)-2'-deoxyuridine
  misc_feature (3)..(3): n is 2'-O-methyl-adenosine
  misc_feature (5)..(5): n is hexaethylene glycol
  misc_feature (7)..(8): n is 5-(N-benzylcarboxyamide)-2'-deoxyuridine
  misc_feature (11)..(11): n is 2'-O-methyl-adenosine
  misc_feature (16)..(18): n is 5-(N-benzylcarboxyamide)-2'-deoxyuridine
  misc_feature (20)..(20): n is 5-(N-benzylcarboxyamide)-2'-deoxyuridine
  misc_feature (21)..(21): n is 2'-O-methyl-adenosine
  misc_feature (24)..(24): n is 2'-O-methyl-guanosine
nnncngnnacncgcgnnnanngcn

SEQ ID NO: 106 - DNA, 24 bp, Artificial Sequence
  Synthetic
  misc_feature (1)..(1): n is 5-(N-benzylcarboxyamide)-2'-deoxyuridine
  misc_feature (2)..(2): n is 5-[N-(3-benzo[b]thiophene-2-ethyl)carboxyamide]-2'-deoxyuridine
  misc_feature (3)..(3): n is 2'-O-methyl-adenosine
  misc_feature (5)..(5): n is hexaethylene glycol
  misc_feature (7)..(8): n is 5-(N-benzylcarboxyamide)-2'-deoxyuridine
  misc_feature (11)..(11): n is 2'-O-methyl-adenosine
  misc_feature (16)..(18): n is 5-(N-benzylcarboxyamide)-2'-deoxyuridine
  misc_feature (20)..(20): n is 5-(N-benzylcarboxyamide)-2'-deoxyuridine
  misc_feature (21)..(21): n is 2'-O-methyl-adenosine
  misc_feature (24)..(24): n is 2'-O-methyl-guanosine
nnncngnnacncgcgnnnanngcn

SEQ ID NO: 107 - DNA, 24 bp, Artificial Sequence
  Synthetic
  misc_feature (1)..(2): n is 5-(N-benzylcarboxyamide)-2'-deoxyuridine
  misc_feature (3)..(3): n is 2'-O-methyl-adenosine
  misc_feature (5)..(5): n is hexaethylene glycol
  misc_feature (7)..(7): n is 5-[N-(3-benzo[b]thiophene-2-ethyl)carboxyamide]-2'-deoxyuridine
  misc_feature (8)..(8): n is 5-(N-benzylcarboxyamide)-2'-deoxyuridine
  misc_feature (11)..(11): n is 2'-O-methyl-adenosine
  misc_feature (16)..(18): n is 5-(N-benzylcarboxyamide)-2'-deoxyuridine
  misc_feature (20)..(20): n is 5-(N-benzylcarboxyamide)-2'-deoxyuridine
  misc_feature (21)..(21): n is 2'-O-methyl-adenosine
  misc_feature (24)..(24): n is 2'-O-methyl-guanosine
nnncngnnacncgcgnnnanngcn

SEQ ID NO: 108 - DNA, 24 bp, Artificial Sequence
  Synthetic
  misc_feature (1)..(2): n is 5-(N-benzylcarboxyamide)-2'-deoxyuridine
  misc_feature (3)..(3): n is 2'-O-methyl-adenosine
  misc_feature (5)..(5): n is hexaethylene glycol
  misc_feature (7)..(7): n is 5-(N-benzylcarboxyamide)-2'-deoxyuridine
  misc_feature (8)..(8): n is 5-[N-(3-benzo[b]thiophene-2-ethyl)carboxyamide]-2'-deoxyuridine
  misc_feature (11)..(11): n is 2'-O-methyl-adenosine
  misc_feature (16)..(18): n is 5-(N-benzylcarboxyamide)-2'-deoxyuridine
  misc_feature (20)..(20): n is 5-(N-benzylcarboxyamide)-2'-deoxyuridine
  misc_feature (21)..(21): n is 2'-O-methyl-adenosine
  misc_feature (24)..(24): n is 2'-O-methyl-guanosine
nnncngnnacncgcgnnnanngcn

SEQ ID NO: 109 - DNA, 24 bp, Artificial Sequence
  Synthetic
  misc_feature (1)..(2): n is 5-(N-benzylcarboxyamide)-2'-deoxyuridine
  misc_feature (3)..(3): n is 2'-O-methyl-adenosine
  misc_feature (5)..(5): n is hexaethylene glycol
  misc_feature (7)..(8): n is 5-(N-benzylcarboxyamide)-2'-deoxyuridine
  misc_feature (11)..(11): n is 2'-O-methyl-adenosine
  misc_feature (16)..(16): n is 5-[N-(3-benzo[b]thiophene-2-ethyl)carboxyamide]-2'-deoxyuridine
  misc_feature (17)..(18): n is 5-(N-benzylcarboxyamide)-2'-deoxyuridine
  misc_feature (20)..(20): n is 5-(N-benzylcarboxyamide)-2'-deoxyuridine
  misc_feature (21)..(21): n is 2'-O-methyl-adenosine
  misc_feature (24)..(24): n is 2'-O-methyl-guanosine
nnncngnnacncgcgnnnanngcn

SEQ ID NO: 110 - DNA, 24 bp, Artificial Sequence
  Synthetic
  misc_feature (1)..(2): n is 5-(N-benzylcarboxyamide)-2'-deoxyuridine
  misc_feature (3)..(3): n is 2'-O-methyl-adenosine
  misc_feature (5)..(5): n is hexaethylene glycol
  misc_feature (7)..(8): n is 5-(N-benzylcarboxyamide)-2'-deoxyuridine
  misc_feature (11)..(11): n is 2'-O-methyl-adenosine
  misc_feature (16)..(16): n is 5-(N-benzylcarboxyamide)-2'-deoxyuridine
  misc_feature (17)..(17): n is 5-[N-(3-benzo[b]thiophene-2-ethyl)carboxyamide]-2'-deoxyuridine
  misc_feature (18)..(18): n is 5-(N-benzylcarboxyamide)-2'-deoxyuridine
  misc_feature (20)..(20): n is 5-(N-benzylcarboxyamide)-2'-deoxyuridine
  misc_feature (21)..(21): n is 2'-O-methyl-adenosine
  misc_feature (24)..(24): n is 2'-O-methyl-guanosine
nnncngnnacncgcgnnnanngcn

SEQ ID NO: 111 - DNA, 24 bp, Artificial Sequence
  Synthetic
  misc_feature (1)..(2): n is 5-(N-benzylcarboxyamide)-2'-deoxyuridine
  misc_feature (3)..(3): n is 2'-O-methyl-adenosine
  misc_feature (5)..(5): n is hexaethylene glycol
  misc_feature (7)..(8): n is 5-(N-benzylcarboxyamide)-2'-deoxyuridine
  misc_feature (11)..(11): n is 2'-O-methyl-adenosine
  misc_feature (16)..(17): n is 5-(N-benzylcarboxyamide)-2'-deoxyuridine
  misc_feature (18)..(18): n is 5-[N-(3-benzo[b]thiophene-2-ethyl)carboxyamide]-2'-deoxyuridine
  misc_feature (20)..(20): n is 5-(N-benzylcarboxyamide)-2'-deoxyuridine
  misc_feature (21)..(21): n is 2'-O-methyl-adenosine
  misc_feature (24)..(24): n is 2'-O-methyl-guanosine
nnncngnnacncgcgnnnanngcn

SEQ ID NO: 112 - DNA, 24 bp, Artificial Sequence
  Synthetic
  misc_feature (1)..(2): n is 5-(N-benzylcarboxyamide)-2'-deoxyuridine
  misc_feature (3)..(3): n is 2'-O-methyl-adenosine
  misc_feature (5)..(5): n is hexaethylene glycol
  misc_feature (7)..(8): n is 5-(N-benzylcarboxyamide)-2'-deoxyuridine
  misc_feature (11)..(11): n is 2'-O-methyl-adenosine
  misc_feature (16)..(18): n is 5-(N-benzylcarboxyamide)-2'-deoxyuridine
  misc_feature (20)..(20): n is 5-[N-(3-benzo[b]thiophene-2-ethyl)carboxyamide]-2'-deoxyuridine
  misc_feature (21)..(21): n is 2'-O-methyl-adenosine
  misc_feature (24)..(24): n is 2'-O-methyl-guanosine
nnncngnnacncgcgnnnanngcn

SEQ ID NO: 113 - DNA, 24 bp, Artificial Sequence
  Synthetic
  misc_feature (1)..(1): n is 5-[N-(2-thiophene-methyl)carboxyamide]-2'-deoxyuridine
  misc_feature (2)..(2): n is 5-(N-benzylcarboxyamide)-2'-deoxyuridine
  misc_feature (3)..(3): n is 2'-O-methyl-adenosine
  misc_feature (5)..(5): n is hexaethylene glycol
  misc_feature (7)..(8): n is 5-(N-benzylcarboxyamide)-2'-deoxyuridine
  misc_feature (11)..(11): n is 2'-O-methyl-adenosine
  misc_feature (16)..(18): n is 5-(N-benzylcarboxyamide)-2'-deoxyuridine
  misc_feature (20)..(20): n is 5-(N-benzylcarboxyamide)-2'-deoxyuridine
  misc_feature (21)..(21): n is 2'-O-methyl-adenosine
  misc_feature (24)..(24): n is 2'-O-methyl-guanosine
nnncngnnacncgcgnnnanngcn

SEQ ID NO: 114 - DNA, 24 bp, Artificial Sequence
  Synthetic
  misc_feature (1)..(1): n is 5-(N-benzylcarboxyamide)-2'-deoxyuridine
  misc_feature (2)..(2): n is 5-[N-(2-thiophene-methyl)carboxyamide]-2'-deoxyuridine
  misc_feature (3)..(3): n is 2'-O-methyl-adenosine
  misc_feature (5)..(5): n is hexaethylene glycol
  misc_feature (7)..(8): n is 5-(N-benzylcarboxyamide)-2'-deoxyuridine
  misc_feature (11)..(11): n is 2'-O-methyl-adenosine
  misc_feature (16)..(18): n is 5-(N-benzylcarboxyamide)-2'-deoxyuridine
  misc_feature (20)..(20): n is 5-(N-benzylcarboxyamide)-2'-deoxyuridine
  misc_feature (21)..(21): n is 2'-O-methyl-adenosine
  misc_feature (24)..(24): n is 2'-O-methyl-guanosine
nnncngnnacncgcgnnnanngcn

SEQ ID NO: 115 - DNA, 24 bp, Artificial Sequence
  Synthetic
  misc_feature (1)..(2): n is 5-(N-benzylcarboxyamide)-2'-deoxyuridine
  misc_feature (3)..(3): n is 2'-O-methyl-adenosine
  misc_feature (5)..(5): n is hexaethylene glycol
  misc_feature (7)..(7): n is 5-[N-(2-thiophene-methyl)carboxyamide]-2'-deoxyuridine
  misc_feature (8)..(8): n is 5-(N-benzylcarboxyamide)-2'-deoxyuridine
  misc_feature (11)..(11): n is 2'-O-methyl-adenosine
  misc_feature (16)..(18): n is 5-(N-benzylcarboxyamide)-2'-deoxyuridine
  misc_feature (20)..(20): n is 5-(N-benzylcarboxyamide)-2'-deoxyuridine
  misc_feature (21)..(21): n is 2'-O-methyl-adenosine
  misc_feature (24)..(24): n is 2'-O-methyl-guanosine
nnncngnnacncgcgnnnanngcn

SEQ ID NO: 116 - DNA, 24 bp, Artificial Sequence
  Synthetic
  misc_feature (1)..(2): n is 5-(N-benzylcarboxyamide)-2'-deoxyuridine
  misc_feature (3)..(3): n is 2'-O-methyl-adenosine
  misc_feature (5)..(5): n is hexaethylene glycol
  misc_feature (7)..(7): n is 5-(N-benzylcarboxyamide)-2'-deoxyuridine
  misc_feature (8)..(8): n is 5-[N-(2-thiophene-methyl)carboxyamide]-2'-deoxyuridine
  misc_feature (11)..(11): n is 2'-O-methyl-adenosine
  misc_feature (16)..(18): n is 5-(N-benzylcarboxyamide)-2'-deoxyuridine
  misc_feature (20)..(20): n is 5-(N-benzylcarboxyamide)-2'-deoxyuridine
  misc_feature (21)..(21): n is 2'-O-methyl-adenosine
  misc_feature (24)..(24): n is 2'-O-methyl-guanosine
nnncngnnacncgcgnnnanngcn

SEQ ID NO: 117 - DNA, 24 bp, Artificial Sequence
  Synthetic
  misc_feature (1)..(2): n is 5-(N-benzylcarboxyamide)-2'-deoxyuridine
  misc_feature (3)..(3): n is 2'-O-methyl-adenosine
  misc_feature (5)..(5): n is hexaethylene glycol
  misc_feature (7)..(8): n is 5-(N-benzylcarboxyamide)-2'-deoxyuridine
  misc_feature (11)..(11): n is 2'-O-methyl-adenosine
  misc_feature (16)..(16): n is 5-[N-(2-thiophene-methyl)carboxyamide]-2'-deoxyuridine
  misc_feature (17)..(18): n is 5-(N-benzylcarboxyamide)-2'-deoxyuridine
  misc_feature (20)..(20): n is 5-(N-benzylcarboxyamide)-2'-deoxyuridine
  misc_feature (21)..(21): n is 2'-O-methyl-adenosine
  misc_feature (24)..(24): n is 2'-O-methyl-guanosine
nnncngnnacncgcgnnnanngcn

SEQ ID NO: 118 - DNA, 24 bp, Artificial Sequence
  Synthetic
  misc_feature (1)..(2): n is 5-(N-benzylcarboxyamide)-2'-deoxyuridine
  misc_feature (3)..(3): n is 2'-O-methyl-adenosine
  misc_feature (5)..(5): n is hexaethylene glycol
  misc_feature (7)..(8): n is 5-(N-benzylcarboxyamide)-2'-deoxyuridine
  misc_feature (11)..(11): n is 2'-O-methyl-adenosine
  misc_feature (16)..(16): n is 5-(N-benzylcarboxyamide)-2'-deoxyuridine
  misc_feature (17)..(17): n is 5-[N-(2-thiophene-methyl)carboxyamide]-2'-deoxyuridine
  misc_feature (18)..(18): n is 5-(N-benzylcarboxyamide)-2'-deoxyuridine
  misc_feature (20)..(20): n is 5-(N-benzylcarboxyamide)-2'-deoxyuridine
  misc_feature (21)..(21): n is 2'-O-methyl-adenosine
  misc_feature (24)..(24): n is 2'-O-methyl-guanosine
nnncngnnacncgcgnnnanngcn

SEQ ID NO: 119 - DNA, 24 bp, Artificial Sequence
  Synthetic
  misc_feature (1)..(2): n is 5-(N-benzylcarboxyamide)-2'-deoxyuridine
  misc_feature (3)..(3): n is 2'-O-methyl-adenosine
  misc_feature (5)..(5): n is hexaethylene glycol
  misc_feature (7)..(8): n is 5-(N-benzylcarboxyamide)-2'-deoxyuridine
  misc_feature (11)..(11): n is 2'-O-methyl-adenosine
  misc_feature (16)..(17): n is 5-(N-benzylcarboxyamide)-2'-deoxyuridine
  misc_feature (18)..(18): n is 5-[N-(2-thiophene-methyl)carboxyamide]-2'-deoxyuridine
  misc_feature (20)..(20): n is 5-(N-benzylcarboxyamide)-2'-deoxyuridine
  misc_feature (21)..(21): n is 2'-O-methyl-adenosine
  misc_feature (24)..(24): n is 2'-O-methyl-guanosine
nnncngnnacncgcgnnnanngcn

SEQ ID NO: 120 - DNA, 24 bp, Artificial Sequence
  Synthetic
  misc_feature (1)..(2): n is 5-(N-benzylcarboxyamide)-2'-deoxyuridine
  misc_feature (3)..(3): n is 2'-O-methyl-adenosine
  misc_feature (5)..(5): n is hexaethylene glycol
  misc_feature (7)..(8): n is 5-(N-benzylcarboxyamide)-2'-deoxyuridine
  misc_feature (11)..(11): n is 2'-O-methyl-adenosine
  misc_feature (16)..(18): n is 5-(N-benzylcarboxyamide)-2'-deoxyuridine
  misc_feature (20)..(20): n is 5-[N-(2-thiophene-methyl)carboxyamide]-2'-deoxyuridine
  misc_feature (21)..(21): n is 2'-O-methyl-adenosine
  misc_feature (24)..(24): n is 2'-O-methyl-guanosine
nnncngnnacncgcgnnnanngcn

SEQ ID NO: 121 - DNA, 24 bp, Artificial Sequence
  Synthetic
  misc_feature (1)..(1): n is 5-[N-(1-naphthylmethyl)carboxyamide]-2'-deoxyuridine
  misc_feature (2)..(2): n is 5-(N-benzylcarboxyamide)-2'-deoxyuridine
  misc_feature (3)..(3): n is 2'-O-methyl-adenosine
  misc_feature (5)..(5): n is hexaethylene glycol
  misc_feature (7)..(8): n is 5-(N-benzylcarboxyamide)-2'-deoxyuridine
  misc_feature (11)..(11): n is 2'-O-methyl-adenosine
  misc_feature (16)..(18): n is 5-(N-benzylcarboxyamide)-2'-deoxyuridine
  misc_feature (20)..(20): n is 5-(N-benzylcarboxyamide)-2'-deoxyuridine
  misc_feature (21)..(21): n is 2'-O-methyl-adenosine
  misc_feature (24)..(24): n is 2'-O-methyl-guanosine
nnncngnnacncgcgnnnanngcn

SEQ ID NO: 122 - DNA, 24 bp, Artificial Sequence
  Synthetic
  misc_feature (1)..(1): n is 5-(N-benzylcarboxyamide)-2'-deoxyuridine
  misc_feature (2)..(2): n is 5-[N-(1-naphthylmethyl)carboxyamide]-2'-deoxyuridine
  misc_feature (3)..(3): n is 2'-O-methyl-adenosine
  misc_feature (5)..(5): n is hexaethylene glycol
  misc_feature (7)..(8): n is 5-(N-benzylcarboxyamide)-2'-deoxyuridine
  misc_feature (11)..(11): n is 2'-O-methyl-adenosine
  misc_feature (16)..(18): n is 5-(N-benzylcarboxyamide)-2'-deoxyuridine
  misc_feature (20)..(20): n is 5-(N-benzylcarboxyamide)-2'-deoxyuridine
  misc_feature (21)..(21): n is 2'-O-methyl-adenosine
  misc_feature (24)..(24): n is 2'-O-methyl-guanosine
nnncngnnacncgcgnnnanngcn

SEQ ID NO: 123 - DNA, 24 bp, Artificial Sequence
  Synthetic
  misc_feature (1)..(2): n is 5-(N-benzylcarboxyamide)-2'-deoxyuridine
  misc_feature (3)..(3): n is 2'-O-methyl-adenosine
  misc_feature (5)..(5): n is hexaethylene glycol
  misc_feature (7)..(7): n is 5-[N-(1-naphthylmethyl)carboxyamide]-2'-deoxyuridine
  misc_feature (8)..(8): n is 5-(N-benzylcarboxyamide)-2'-deoxyuridine
  misc_feature (11)..(11): n is 2'-O-methyl-adenosine
  misc_feature (16)..(18): n is 5-(N-benzylcarboxyamide)-2'-deoxyuridine
  misc_feature (20)..(20): n is 5-(N-benzylcarboxyamide)-2'-deoxyuridine
  misc_feature (21)..(21): n is 2'-O-methyl-adenosine
  misc_feature (24)..(24): n is 2'-O-methyl-guanosine
nnncngnnacncgcgnnnanngcn

SEQ ID NO: 124 - DNA, 24 bp, Artificial Sequence
  Synthetic
  misc_feature (1)..(2): n is 5-(N-benzylcarboxyamide)-2'-deoxyuridine
  misc_feature (3)..(3): n is 2'-O-methyl-adenosine
  misc_feature (5)..(5): n is hexaethylene glycol
  misc_feature (7)..(7): n is 5-(N-benzylcarboxyamide)-2'-deoxyuridine
  misc_feature (8)..(8): n is 5-[N-(1-naphthylmethyl)carboxyamide]-2'-deoxyuridine
  misc_feature (11)..(11): n is 2'-O-methyl-adenosine
  misc_feature (16)..(18): n is 5-(N-benzylcarboxyamide)-2'-deoxyuridine
  misc_feature (20)..(20): n is 5-(N-benzylcarboxyamide)-2'-deoxyuridine
  misc_feature (21)..(21): n is 2'-O-methyl-adenosine
  misc_feature (24)..(24): n is 2'-O-methyl-guanosine
nnncngnnacncgcgnnnanngcn

SEQ ID NO: 125 - DNA, 24 bp, Artificial Sequence
  Synthetic
  misc_feature (1)..(2): n is 5-(N-benzylcarboxyamide)-2'-deoxyuridine
  misc_feature (3)..(3): n is 2'-O-methyl-adenosine
  misc_feature (5)..(5): n is hexaethylene glycol
  misc_feature (7)..(8): n is 5-(N-benzylcarboxyamide)-2'-deoxyuridine
  misc_feature (11)..(11): n is 2'-O-methyl-adenosine
  misc_feature (16)..(16): n is 5-[N-(1-naphthylmethyl)carboxyamide]-2'-deoxyuridine
  misc_feature (17)..(18): n is 5-(N-benzylcarboxyamide)-2'-deoxyuridine
  misc_feature (20)..(20): n is 5-(N-benzylcarboxyamide)-2'-deoxyuridine
  misc_feature (21)..(21): n is 2'-O-methyl-adenosine
  misc_feature (24)..(24): n is 2'-O-methyl-guanosine
nnncngnnacncgcgnnnanngcn

SEQ ID NO: 126 - DNA, 24 bp, Artificial Sequence
  Synthetic
  misc_feature (1)..(2): n is 5-(N-benzylcarboxyamide)-2'-deoxyuridine
  misc_feature (3)..(3): n is 2'-O-methyl-adenosine
  misc_feature (5)..(5): n is hexaethylene glycol
  misc_feature (7)..(8): n is 5-(N-benzylcarboxyamide)-2'-deoxyuridine
  misc_feature (11)..(11): n is 2'-O-methyl-adenosine
  misc_feature (16)..(16): n is 5-(N-benzylcarboxyamide)-2'-deoxyuridine
  misc_feature (17)..(17): n is 5-[N-(1-naphthylmethyl)carboxyamide]-2'-deoxyuridine
  misc_feature (18)..(18): n is 5-(N-benzylcarboxyamide)-2'-deoxyuridine
  misc_feature (20)..(20): n is 5-(N-benzylcarboxyamide)-2'-deoxyuridine
  misc_feature (21)..(21): n is 2'-O-methyl-adenosine
  misc_feature (24)..(24): n is 2'-O-methyl-guanosine
nnncngnnacncgcgnnnanngcn

SEQ ID NO: 127 - DNA, 24 bp, Artificial Sequence
  Synthetic
  misc_feature (1)..(2): n is 5-(N-benzylcarboxyamide)-2'-deoxyuridine
  misc_feature (3)..(3): n is 2'-O-methyl-adenosine
  misc_feature (5)..(5): n is hexaethylene glycol
  misc_feature (7)..(8): n is 5-(N-benzylcarboxyamide)-2'-deoxyuridine
  misc_feature (11)..(11): n is 2'-O-methyl-adenosine
  misc_feature (16)..(17): n is 5-(N-benzylcarboxyamide)-2'-deoxyuridine
  misc_feature (18)..(18): n is 5-[N-(1-naphthylmethyl)carboxyamide]-2'-deoxyuridine
  misc_feature (20)..(20): n is 5-(N-benzylcarboxyamide)-2'-deoxyuridine
  misc_feature (21)..(21): n is 2'-O-methyl-adenosine
  misc_feature (24)..(24): n is 2'-O-methyl-guanosine
nnncngnnacncgcgnnnanngcn

SEQ ID NO: 128 - DNA, 24 bp, Artificial Sequence
  Synthetic
  misc_feature (1)..(2): n is 5-(N-benzylcarboxyamide)-2'-deoxyuridine
  misc_feature (3)..(3): n is 2'-O-methyl-adenosine
  misc_feature (5)..(5): n is hexaethylene glycol
  misc_feature (7)..(8): n is 5-(N-benzylcarboxyamide)-2'-deoxyuridine
  misc_feature (11)..(11): n is 2'-O-methyl-adenosine
  misc_feature (16)..(18): n is 5-(N-benzylcarboxyamide)-2'-deoxyuridine
  misc_feature (20)..(20): n is 5-[N-(1-naphthylmethyl)carboxyamide]-2'-deoxyuridine
  misc_feature (21)..(21): n is 2'-O-methyl-adenosine
  misc_feature (24)..(24): n is 2'-O-methyl-guanosine
nnncngnnacncgcgnnnanngcn

SEQ ID NO: 129 - DNA, 24 bp, Artificial Sequence
  Synthetic
  misc_feature (1)..(1): n is 5-[N-isobutyl-carboxyamide]-2'-deoxyuridine
  misc_feature (2)..(2): n is 5-(N-benzylcarboxyamide)-2'-deoxyuridine
  misc_feature (3)..(3): n is 2'-O-methyl-adenosine
  misc_feature (5)..(5): n is hexaethylene glycol
  misc_feature (7)..(8): n is 5-(N-benzylcarboxyamide)-2'-deoxyuridine
  misc_feature (11)..(11): n is 2'-O-methyl-adenosine
  misc_feature (16)..(18): n is 5-(N-benzylcarboxyamide)-2'-deoxyuridine
  misc_feature (20)..(20): n is 5-(N-benzylcarboxyamide)-2'-deoxyuridine
  misc_feature (21)..(21): n is 2'-O-methyl-adenosine
  misc_feature (24)..(24): n is 2'-O-methyl-guanosine
nnncngnnacncgcgnnnanngcn

SEQ ID NO: 130 - DNA, 24 bp, Artificial Sequence
  Synthetic
  misc_feature (1)..(1): n is 5-(N-benzylcarboxyamide)-2'-deoxyuridine
  misc_feature (2)..(2): n is 5-[N-isobutyl-carboxyamide]-2'-deoxyuridine
  misc_feature (3)..(3): n is 2'-O-methyl-adenosine
  misc_feature (5)..(5): n is hexaethylene glycol
  misc_feature (7)..(8): n is 5-(N-benzylcarboxyamide)-2'-deoxyuridine
  misc_feature (11)..(11): n is 2'-O-methyl-adenosine
  misc_feature (16)..(18): n is 5-(N-benzylcarboxyamide)-2'-deoxyuridine
  misc_feature (20)..(20): n is 5-(N-benzylcarboxyamide)-2'-deoxyuridine
  misc_feature (21)..(21): n is 2'-O-methyl-adenosine
  misc_feature (24)..(24): n is 2'-O-methyl-guanosine
nnncngnnacncgcgnnnanngcn

SEQ ID NO: 131 - DNA, 24 bp, Artificial Sequence
  Synthetic
  misc_feature (1)..(2): n is 5-(N-benzylcarboxyamide)-2'-deoxyuridine
  misc_feature (3)..(3): n is 2'-O-methyl-adenosine
  misc_feature (5)..(5): n is hexaethylene glycol
  misc_feature (7)..(7): n is 5-[N-isobutyl-carboxyamide]-2'-deoxyuridine
  misc_feature (8)..(8): n is 5-(N-benzylcarboxyamide)-2'-deoxyuridine
  misc_feature (11)..(11): n is 2'-O-methyl-adenosine
  misc_feature (16)..(18): n is 5-(N-benzylcarboxyamide)-2'-deoxyuridine
  misc_feature (20)..(20): n is 5-(N-benzylcarboxyamide)-2'-deoxyuridine
  misc_feature (21)..(21): n is 2'-O-methyl-adenosine
  misc_feature (24)..(24): n is 2'-O-methyl-guanosine
nnncngnnacncgcgnnnanngcn

SEQ ID NO: 132 - DNA, 24 bp, Artificial Sequence
  Synthetic
  misc_feature (1)..(2): n is 5-(N-benzylcarboxyamide)-2'-deoxyuridine
  misc_feature (3)..(3): n is 2'-O-methyl-adenosine
  misc_feature (5)..(5): n is hexaethylene glycol
  misc_feature (7)..(7): n is 5-(N-benzylcarboxyamide)-2'-deoxyuridine
  misc_feature (8)..(8): n is 5-[N-isobutyl-carboxyamide]-2'-deoxyuridine
  misc_feature (11)..(11): n is 2'-O-methyl-adenosine
  misc_feature (16)..(18): n is 5-(N-benzylcarboxyamide)-2'-deoxyuridine
  misc_feature (20)..(20): n is 5-(N-benzylcarboxyamide)-2'-deoxyuridine
  misc_feature (21)..(21): n is 2'-O-methyl-adenosine
  misc_feature (24)..(24): n is 2'-O-methyl-guanosine
nnncngnnacncgcgnnnanngcn

SEQ ID NO: 133 - DNA, 24 bp, Artificial Sequence
  Synthetic
  misc_feature (1)..(2): n is 5-(N-benzylcarboxyamide)-2'-deoxyuridine
  misc_feature (3)..(3): n is 2'-O-methyl-adenosine
  misc_feature (5)..(5): n is hexaethylene glycol
  misc_feature (7)..(8): n is 5-(N-benzylcarboxyamide)-2'-deoxyuridine
  misc_feature (11)..(11): n is 2'-O-methyl-adenosine
  misc_feature (16)..(16): n is 5-[N-isobutyl-carboxyamide]-2'-deoxyuridine
  misc_feature (17)..(18): n is 5-(N-benzylcarboxyamide)-2'-deoxyuridine
  misc_feature (20)..(20): n is 5-(N-benzylcarboxyamide)-2'-deoxyuridine
  misc_feature (21)..(21): n is 2'-O-methyl-adenosine
  misc_feature (24)..(24): n is 2'-O-methyl-guanosine
nnncngnnacncgcgnnnanngcn

SEQ ID NO: 134 - DNA, 24 bp, Artificial Sequence
  Synthetic
  misc_feature (1)..(2): n is 5-(N-benzylcarboxyamide)-2'-deoxyuridine
  misc_feature (3)..(3): n is 2'-O-methyl-adenosine
  misc_feature (5)..(5): n is hexaethylene glycol
  misc_feature (7)..(8): n is 5-(N-benzylcarboxyamide)-2'-deoxyuridine
  misc_feature (11)..(11): n is 2'-O-methyl-adenosine
  misc_feature (16)..(16): n is 5-(N-benzylcarboxyamide)-2'-deoxyuridine
  misc_feature (17)..(17): n is 5-[N-isobutyl-carboxyamide]-2'-deoxyuridine
  misc_feature (18)..(18): n is 5-(N-benzylcarboxyamide)-2'-deoxyuridine
  misc_feature (20)..(20): n is 5-(N-benzylcarboxyamide)-2'-deoxyuridine
  misc_feature (21)..(21): n is 2'-O-methyl-adenosine
  misc_feature (24)..(24): n is 2'-O-methyl-guanosine
nnncngnnacncgcgnnnanngcn

SEQ ID NO: 135 - DNA, 24 bp, Artificial Sequence
  Synthetic
  misc_feature (1)..(2): n is 5-(N-benzylcarboxyamide)-2'-deoxyuridine
  misc_feature (3)..(3): n is 2'-O-methyl-adenosine
  misc_feature (5)..(5): n is hexaethylene glycol
  misc_feature (7)..(8): n is 5-(N-benzylcarboxyamide)-2'-deoxyuridine
  misc_feature (11)..(11): n is 2'-O-methyl-adenosine
  misc_feature (16)..(17): n is 5-(N-benzylcarboxyamide)-2'-deoxyuridine
  misc_feature (18)..(18): n is 5-[N-isobutyl-carboxyamide]-2'-deoxyuridine
  misc_feature (20)..(20): n is 5-(N-benzylcarboxyamide)-2'-deoxyuridine
  misc_feature (21)..(21): n is 2'-O-methyl-adenosine
  misc_feature (24)..(24): n is 2'-O-methyl-guanosine
nnncngnnacncgcgnnnanngcn

SEQ ID NO: 136 - DNA, 24 bp, Artificial Sequence
  Synthetic
  misc_feature (1)..(2): n is 5-(N-benzylcarboxyamide)-2'-deoxyuridine
  misc_feature (3)..(3): n is 2'-O-methyl-adenosine
  misc_feature (5)..(5): n is hexaethylene glycol
  misc_feature (7)..(8): n is 5-(N-benzylcarboxyamide)-2'-deoxyuridine
  misc_feature (11)..(11): n is 2'-O-methyl-adenosine
  misc_feature (16)..(18): n is 5-(N-benzylcarboxyamide)-2'-deoxyuridine
  misc_feature (20)..(20): n is 5-[N-isobutyl-carboxyamide]-2'-deoxyuridine
  misc_feature (21)..(21): n is 2'-O-methyl-adenosine
  misc_feature (24)..(24): n is 2'-O-methyl-guanosine
nnncngnnacncgcgnnnanngcn

SEQ ID NO: 137 - DNA, 24 bp, Artificial Sequence
  Synthetic
  misc_feature (1)..(1): n is 5-[N-(3-indole-2-ethyl)-carboxyamide]-2'-deoxyuridine
  misc_feature (2)..(2): n is 5-(N-benzylcarboxyamide)-2'-deoxyuridine
  misc_feature (3)..(3): n is 2'-O-methyl-adenosine
  misc_feature (5)..(5): n is hexaethylene glycol
  misc_feature (7)..(8): n is 5-(N-benzylcarboxyamide)-2'-deoxyuridine
  misc_feature (11)..(11): n is 2'-O-methyl-adenosine
  misc_feature (16)..(18): n is 5-(N-benzylcarboxyamide)-2'-deoxyuridine
  misc_feature (20)..(20): n is 5-(N-benzylcarboxyamide)-2'-deoxyuridine
  misc_feature (21)..(21): n is 2'-O-methyl-adenosine
  misc_feature (24)..(24): n is 2'-O-methyl-guanosine
nnncngnnacncgcgnnnanngcn

SEQ ID NO: 138 - DNA, 24 bp, Artificial Sequence
  Synthetic
  misc_feature (1)..(1): n is 5-(N-benzylcarboxyamide)-2'-deoxyuridine
  misc_feature (2)..(2): n is 5-[N-(3-indole-2-ethyl)-carboxyamide]-2'-deoxyuridine
  misc_feature (3)..(3): n is 2'-O-methyl-adenosine
  misc_feature (5)..(5): n is hexaethylene glycol
  misc_feature (7)..(8): n is 5-(N-benzylcarboxyamide)-2'-deoxyuridine
  misc_feature (11)..(11): n is 2'-O-methyl-adenosine
  misc_feature (16)..(18): n is 5-(N-benzylcarboxyamide)-2'-deoxyuridine
  misc_feature (20)..(20): n is 5-(N-benzylcarboxyamide)-2'-deoxyuridine
  misc_feature (21)..(21): n is 2'-O-methyl-adenosine
  misc_feature (24)..(24): n is 2'-O-methyl-guanosine
nnncngnnacncgcgnnnanngcn

SEQ ID NO: 139 - DNA, 24 bp, Artificial Sequence
  Synthetic
  misc_feature (1)..(2): n is 5-(N-benzylcarboxyamide)-2'-deoxyuridine
  misc_feature (3)..(3): n is 2'-O-methyl-adenosine
  misc_feature (5)..(5): n is hexaethylene glycol
  misc_feature (7)..(7): n is 5-[N-(3-indole-2-ethyl)-carboxyamide]-2'-deoxyuridine
  misc_feature (8)..(8): n is 5-(N-benzylcarboxyamide)-2'-deoxyuridine
  misc_feature (11)..(11): n is 2'-O-methyl-adenosine
  misc_feature (16)..(18): n is 5-(N-benzylcarboxyamide)-2'-deoxyuridine
  misc_feature (20)..(20): n is 5-(N-benzylcarboxyamide)-2'-deoxyuridine
  misc_feature (21)..(21): n is 2'-O-methyl-adenosine
  misc_feature (24)..(24): n is 2'-O-methyl-guanosine
nnncngnnacncgcgnnnanngcn

SEQ ID NO: 140 - DNA, 24 bp, Artificial Sequence
  Synthetic
  misc_feature (1)..(2): n is 5-(N-benzylcarboxyamide)-2'-deoxyuridine
  misc_feature (3)..(3): n is 2'-O-methyl-adenosine
  misc_feature (5)..(5): n is hexaethylene glycol
  misc_feature (7)..(8): n is 5-(N-benzylcarboxyamide)-2'-deoxyuridine
  misc_feature (11)..(11): n is 2'-O-methyl-adenosine
  misc_feature (16)..(17): n is 5-(N-benzylcarboxyamide)-2'-deoxyuridine
  misc_feature (18)..(18): n is 5-[N-(3-indole-2-ethyl)-carboxyamide]-2'-deoxyuridine
  misc_feature (20)..(20): n is 5-(N-benzylcarboxyamide)-2'-deoxyuridine
  misc_feature (21)..(21): n is 2'-O-methyl-adenosine
  misc_feature (24)..(24): n is 2'-O-methyl-guanosine
nnncngnnacncgcgnnnanngcn

SEQ ID NO: 141 - DNA, 24 bp, Artificial Sequence
  Synthetic
  misc_feature (1)..(2): n is 5-(N-benzylcarboxyamide)-2'-deoxyuridine
  misc_feature (3)..(3): n is 2'-O-methyl-adenosine
  misc_feature (5)..(5): n is hexaethylene glycol
  misc_feature (7)..(8): n is 5-(N-benzylcarboxyamide)-2'-deoxyuridine
  misc_feature (11)..(11): n is 2'-O-methyl-adenosine
  misc_feature (16)..(18): n is 5-(N-benzylcarboxyamide)-2'-deoxyuridine
  misc_feature (20)..(20): n is 5-[N-(3-indole-2-ethyl)-carboxyamide]-2'-deoxyuridine
  misc_feature (21)..(21): n is 2'-O-methyl-adenosine
  misc_feature (24)..(24): n is 2'-O-methyl-guanosine
nnncngnnacncgcgnnnanngcn

SEQ ID NO: 142 - DNA, 24 bp, Artificial Sequence
  Synthetic
  misc_feature (1)..(1): n is 5-[N-(2-naphthylmethyl)carboxyamide]-2'-deoxyuridine
  misc_feature (2)..(2): n is 5-(N-benzylcarboxyamide)-2'-deoxyuridine
  misc_feature (3)..(3): n is 2'-O-methyl-adenosine
  misc_feature (5)..(5): n is hexaethylene glycol
  misc_feature (7)..(8): n is 5-(N-benzylcarboxyamide)-2'-deoxyuridine
  misc_feature (11)..(11): n is 2'-O-methyl-adenosine
  misc_feature (16)..(18): n is 5-(N-benzylcarboxyamide)-2'-deoxyuridine
  misc_feature (20)..(20): n is 5-(N-benzylcarboxyamide)-2'-deoxyuridine
  misc_feature (21)..(21): n is 2'-O-methyl-adenosine
  misc_feature (24)..(24): n is 2'-O-methyl-guanosine
nnncngnnacncgcgnnnanngcn

SEQ ID NO: 143 - DNA, 24 bp, Artificial Sequence
  Synthetic
  misc_feature (1)..(1): n is 5-(N-benzylcarboxyamide)-2'-deoxyuridine
  misc_feature (2)..(2): n is 5-[N-(2-naphthylmethyl)carboxyamide]-2'-deoxyuridine
  misc_feature (3)..(3): n is 2'-O-methyl-adenosine
  misc_feature (5)..(5): n is hexaethylene glycol
  misc_feature (7)..(8): n is 5-(N-benzylcarboxyamide)-2'-deoxyuridine
  misc_feature (11)..(11): n is 2'-O-methyl-adenosine
  misc_feature (16)..(18): n is 5-(N-benzylcarboxyamide)-2'-deoxyuridine
  misc_feature (20)..(20): n is 5-(N-benzylcarboxyamide)-2'-deoxyuridine
  misc_feature (21)..(21): n is 2'-O-methyl-adenosine
  misc_feature (24)..(24): n is 2'-O-methyl-guanosine
nnncngnnacncgcgnnnanngcn

SEQ ID NO: 144 - DNA, 24 bp, Artificial Sequence
  Synthetic
  misc_feature (1)..(2): n is 5-(N-benzylcarboxyamide)-2'-deoxyuridine
  misc_feature (3)..(3): n is 2'-O-methyl-adenosine
  misc_feature (5)..(5): n is hexaethylene glycol
  misc_feature (7)..(7): n is 5-[N-(2-naphthylmethyl)carboxyamide]-2'-deoxyuridine
  misc_feature (8)..(8): n is 5-(N-benzylcarboxyamide)-2'-deoxyuridine
  misc_feature (11)..(11): n is 2'-O-methyl-adenosine
  misc_feature (16)..(18): n is 5-(N-benzylcarboxyamide)-2'-deoxyuridine
  misc_feature (20)..(20): n is 5-(N-benzylcarboxyamide)-2'-deoxyuridine
  misc_feature (21)..(21): n is 2'-O-methyl-adenosine
  misc_feature (24)..(24): n is 2'-O-methyl-guanosine
nnncngnnacncgcgnnnanngcn

SEQ ID NO: 145 - DNA, 24 bp, Artificial Sequence
  Synthetic
  misc_feature (1)..(2): n is 5-(N-benzylcarboxyamide)-2'-deoxyuridine
  misc_feature (3)..(3): n is 2'-O-methyl-adenosine
  misc_feature (5)..(5): n is hexaethylene glycol
  misc_feature (7)..(8): n is 5-(N-benzylcarboxyamide)-2'-deoxyuridine
  misc_feature (11)..(11): n is 2'-O-methyl-adenosine
  misc_feature (16)..(16): n is 5-[N-(2-naphthylmethyl)carboxyamide]-2'-deoxyuridine
  misc_feature (17)..(18): n is 5-(N-benzylcarboxyamide)-2'-deoxyuridine
  misc_feature (20)..(20): n is 5-(N-benzylcarboxyamide)-2'-deoxyuridine
  misc_feature (21)..(21): n is 2'-O-methyl-adenosine
  misc_feature (24)..(24): n is 2'-O-methyl-guanosine
nnncngnnacncgcgnnnanngcn

SEQ ID NO: 146 - DNA, 24 bp, Artificial Sequence
  Synthetic
  misc_feature (1)..(2): n is 5-(N-benzylcarboxyamide)-2'-deoxyuridine
  misc_feature (3)..(3): n is 2'-O-methyl-adenosine
  misc_feature (5)..(5): n is hexaethylene glycol
  misc_feature (7)..(8): n is 5-(N-benzylcarboxyamide)-2'-deoxyuridine
  misc_feature (11)..(11): n is 2'-O-methyl-adenosine
  misc_feature (16)..(16): n is 5-(N-benzylcarboxyamide)-2'-deoxyuridine
  misc_feature (17)..(17): n is 5-[N-(2-naphthylmethyl)carboxyamide]-2'-deoxyuridine
  misc_feature (18)..(18): n is 5-(N-benzylcarboxyamide)-2'-deoxyuridine
  misc_feature (20)..(20): n is 5-(N-benzylcarboxyamide)-2'-deoxyuridine
  misc_feature (21)..(21): n is 2'-O-methyl-adenosine
  misc_feature (24)..(24): n is 2'-O-methyl-guanosine
nnncngnnacncgcgnnnanngcn

SEQ ID NO: 147 - DNA, 24 bp, Artificial Sequence
  Synthetic
  misc_feature (1)..(2): n is 5-(N-benzylcarboxyamide)-2'-deoxyuridine
  misc_feature (3)..(3): n is 2'-O-methyl-adenosine
  misc_feature (5)..(5): n is hexaethylene glycol
  misc_feature (7)..(8): n is 5-(N-benzylcarboxyamide)-2'-deoxyuridine
  misc_feature (11)..(11): n is 2'-O-methyl-adenosine
  misc_feature (16)..(17): n is 5-(N-benzylcarboxyamide)-2'-deoxyuridine
  misc_feature (18)..(18): n is 5-[N-(2-naphthylmethyl)carboxyamide]-2'-deoxyuridine
  misc_feature (20)..(20): n is 5-(N-benzylcarboxyamide)-2'-deoxyuridine
  misc_feature (21)..(21): n is 2'-O-methyl-adenosine
  misc_feature (24)..(24): n is 2'-O-methyl-guanosine
nnncngnnacncgcgnnnanngcn

SEQ ID NO: 148 - DNA, 24 bp, Artificial Sequence
  Synthetic
  misc_feature (1)..(2): n is 5-(N-benzylcarboxyamide)-2'-deoxyuridine
  misc_feature (3)..(3): n is 2'-O-methyl-adenosine
  misc_feature (5)..(5): n is hexaethylene glycol
  misc_feature (7)..(8): n is 5-(N-benzylcarboxyamide)-2'-deoxyuridine
  misc_feature (11)..(11): n is 2'-O-methyl-adenosine
  misc_feature (16)..(18): n is 5-(N-benzylcarboxyamide)-2'-deoxyuridine
  misc_feature (20)..(20): n is 5-[N-(2-naphthylmethyl)carboxyamide]-2'-deoxyuridine
  misc_feature (21)..(21): n is 2'-O-methyl-adenosine
  misc_feature (24)..(24): n is 2'-O-methyl-guanosine
nnncngnnacncgcgnnnanngcn

SEQ ID NO: 149 - DNA, 24 bp, Artificial Sequence
  Synthetic
  misc_feature (1)..(1): n is 5-[N-(2-naphthyl-2-ethyl)carboxyamide]-2'-deoxyuridine
  misc_feature (2)..(2): n is 5-(N-benzylcarboxyamide)-2'-deoxyuridine
  misc_feature (3)..(3): n is 2'-O-methyl-adenosine
  misc_feature (5)..(5): n is hexaethylene glycol
  misc_feature (7)..(8): n is 5-(N-benzylcarboxyamide)-2'-deoxyuridine
  misc_feature (11)..(11): n is 2'-O-methyl-adenosine
  misc_feature (16)..(18): n is 5-(N-benzylcarboxyamide)-2'-deoxyuridine
  misc_feature (20)..(20): n is 5-(N-benzylcarboxyamide)-2'-deoxyuridine
  misc_feature (21)..(21): n is 2'-O-methyl-adenosine
  misc_feature (24)..(24): n is 2'-O-methyl-guanosine
nnncngnnacncgcgnnnanngcn

SEQ ID NO: 150 - DNA, 24 bp, Artificial Sequence
  Synthetic
  misc_feature (1)..(1): n is 5-(N-benzylcarboxyamide)-2'-deoxyuridine
  misc_feature (2)..(2): n is 5-[N-(2-naphthyl-2-ethyl)carboxyamide]-2'-deoxyuridine
  misc_feature (3)..(3): n is 2'-O-methyl-adenosine
  misc_feature (5)..(5): n is hexaethylene glycol
  misc_feature (7)..(8): n is 5-(N-benzylcarboxyamide)-2'-deoxyuridine
  misc_feature (11)..(11): n is 2'-O-methyl-adenosine
  misc_feature (16)..(18): n is 5-(N-benzylcarboxyamide)-2'-deoxyuridine
  misc_feature (20)..(20): n is 5-(N-benzylcarboxyamide)-2'-deoxyuridine
  misc_feature (21)..(21): n is 2'-O-methyl-adenosine
  misc_feature (24)..(24): n is 2'-O-methyl-guanosine
nnncngnnacncgcgnnnanngcn

SEQ ID NO: 151 - DNA, 24 bp, Artificial Sequence
  Synthetic
  misc_feature (1)..(2): n is 5-(N-benzylcarboxyamide)-2'-deoxyuridine
  misc_feature (3)..(3): n is 2'-O-methyl-adenosine
  misc_feature (5)..(5): n is hexaethylene glycol
  misc_feature (7)..(7): n is 5-[N-(2-naphthyl-2-ethyl)carboxyamide]-2'-deoxyuridine
  misc_feature (8)..(8): n is 5-(N-benzylcarboxyamide)-2'-deoxyuridine
  misc_feature (11)..(11): n is 2'-O-methyl-adenosine
  misc_feature (16)..(18): n is 5-(N-benzylcarboxyamide)-2'-deoxyuridine
  misc_feature (20)..(20): n is 5-(N-benzylcarboxyamide)-2'-deoxyuridine
  misc_feature (21)..(21): n is 2'-O-methyl-adenosine
  misc_feature (24)..(24): n is 2'-O-methyl-guanosine
nnncngnnacncgcgnnnanngcn

SEQ ID NO: 152 - DNA, 24 bp, Artificial Sequence
  Synthetic
  misc_feature (1)..(2): n is 5-(N-benzylcarboxyamide)-2'-deoxyuridine
  misc_feature (3)..(3): n is 2'-O-methyl-adenosine
  misc_feature (5)..(5): n is hexaethylene glycol
  misc_feature (7)..(7): n is 5-(N-benzylcarboxyamide)-2'-deoxyuridine
  misc_feature (8)..(8): n is 5-[N-(2-naphthyl-2-ethyl)carboxyamide]-2'-deoxyuridine
  misc_feature (11)..(11): n is 2'-O-methyl-adenosine
  misc_feature (16)..(18): n is 5-(N-benzylcarboxyamide)-2'-deoxyuridine
  misc_feature (20)..(20): n is 5-(N-benzylcarboxyamide)-2'-deoxyuridine
  misc_feature (21)..(21): n is 2'-O-methyl-adenosine
  misc_feature (24)..(24): n is 2'-O-methyl-guanosine
nnncngnnacncgcgnnnanngcn

SEQ ID NO: 153 - DNA, 24 bp, Artificial Sequence
  Synthetic
  misc_feature (1)..(2): n is 5-(N-benzylcarboxyamide)-2'-deoxyuridine
  misc_feature (3)..(3): n is 2'-O-methyl-adenosine
  misc_feature (5)..(5): n is hexaethylene glycol
  misc_feature (7)..(8): n is 5-(N-benzylcarboxyamide)-2'-deoxyuridine
  misc_feature (11)..(11): n is 2'-O-methyl-adenosine
  misc_feature (16)..(16): n is 5-[N-(2-naphthyl-2-ethyl)carboxyamide]-2'-deoxyuridine
  misc_feature (17)..(18): n is 5-(N-benzylcarboxyamide)-2'-deoxyuridine
  misc_feature (20)..(20): n is 5-(N-benzylcarboxyamide)-2'-deoxyuridine
  misc_feature (21)..(21): n is 2'-O-methyl-adenosine
  misc_feature (24)..(24): n is 2'-O-methyl-guanosine
nnncngnnacncgcgnnnanngcn

SEQ ID NO: 154 - DNA, 24 bp, Artificial Sequence
  Synthetic
  misc_feature (1)..(2): n is 5-(N-benzylcarboxyamide)-2'-deoxyuridine
  misc_feature (3)..(3): n is 2'-O-methyl-adenosine
  misc_feature (5)..(5): n is hexaethylene glycol
  misc_feature (7)..(8): n is 5-(N-benzylcarboxyamide)-2'-deoxyuridine
  misc_feature (11)..(11): n is 2'-O-methyl-adenosine
  misc_feature (16)..(17): n is 5-(N-benzylcarboxyamide)-2'-deoxyuridine
  misc_feature (18)..(18): n is 5-[N-(2-naphthyl-2-ethyl)carboxyamide]-2'-deoxyuridine
  misc_feature (20)..(20): n is 5-(N-benzylcarboxyamide)-2'-deoxyuridine
  misc_feature (21)..(21): n is 2'-O-methyl-adenosine
  misc_feature (24)..(24): n is 2'-O-methyl-guanosine
nnncngnnacncgcgnnnanngcn

SEQ ID NO: 155 - DNA, 24 bp, Artificial Sequence
  Synthetic
  misc_feature (1)..(2): n is 5-(N-benzylcarboxyamide)-2'-deoxyuridine
  misc_feature (3)..(3): n is 2'-O-methyl-adenosine
  misc_feature (5)..(5): n is hexaethylene glycol
  misc_feature (7)..(8): n is 5-(N-benzylcarboxyamide)-2'-deoxyuridine
  misc_feature (11)..(11): n is 2'-O-methyl-adenosine
  misc_feature (16)..(18): n is 5-(N-benzylcarboxyamide)-2'-deoxyuridine
  misc_feature (20)..(20): n is 5-[N-(2-naphthyl-2-ethyl)carboxyamide]-2'-deoxyuridine
  misc_feature (21)..(21): n is 2'-O-methyl-adenosine
  misc_feature (24)..(24): n is 2'-O-methyl-guanosine
nnncngnnacncgcgnnnanngcn

SEQ ID NO: 156 - DNA, 24 bp, Artificial Sequence
  Synthetic
  misc_feature (1)..(1): n is 5-[N-(1-naphthyl-2-ethyl)carboxyamide]-2'-deoxyuridine
  misc_feature (2)..(2): n is 5-(N-benzylcarboxyamide)-2'-deoxyuridine
  misc_feature (3)..(3): n is 2'-O-methyl-adenosine
  misc_feature (5)..(5): n is hexaethylene glycol
  misc_feature (7)..(8): n is 5-(N-benzylcarboxyamide)-2'-deoxyuridine
  misc_feature (11)..(11): n is 2'-O-methyl-adenosine
  misc_feature (16)..(18): n is 5-(N-benzylcarboxyamide)-2'-deoxyuridine
  misc_feature (20)..(20): n is 5-(N-benzylcarboxyamide)-2'-deoxyuridine
  misc_feature (21)..(21): n is 2'-O-methyl-adenosine
  misc_feature (24)..(24): n is 2'-O-methyl-guanosine
nnncngnnacncgcgnnnanngcn

SEQ ID NO: 157 - DNA, 24 bp, Artificial Sequence
  Synthetic
  misc_feature (1)..(1): n is 5-(N-benzylcarboxyamide)-2'-deoxyuridine
  misc_feature (2)..(2): n is 5-[N-(1-naphthyl-2-ethyl)carboxyamide]-2'-deoxyuridine
  misc_feature (3)..(3): n is 2'-O-methyl-adenosine
  misc_feature (5)..(5): n is hexaethylene glycol
  misc_feature (7)..(8): n is 5-(N-benzylcarboxyamide)-2'-deoxyuridine
  misc_feature (11)..(11): n is 2'-O-methyl-adenosine
  misc_feature (16)..(18): n is 5-(N-benzylcarboxyamide)-2'-deoxyuridine
  misc_feature (20)..(20): n is 5-(N-benzylcarboxyamide)-2'-deoxyuridine
  misc_feature (21)..(21): n is 2'-O-methyl-adenosine
  misc_feature (24)..(24): n is 2'-O-methyl-guanosine
nnncngnnacncgcgnnnanngcn

SEQ ID NO: 158 - DNA, 24 bp, Artificial Sequence
  Synthetic
  misc_feature (1)..(2): n is 5-(N-benzylcarboxyamide)-2'-deoxyuridine
  misc_feature (3)..(3): n is 2'-O-methyl-adenosine
  misc_feature (5)..(5): n is hexaethylene glycol
  misc_feature (7)..(7): n is 5-[N-(1-naphthyl-2-ethyl)carboxyamide]-2'-deoxyuridine
  misc_feature (8)..(8): n is 5-(N-benzylcarboxyamide)-2'-deoxyuridine
  misc_feature (11)..(11): n is 2'-O-methyl-adenosine
  misc_feature (16)..(18): n is 5-(N-benzylcarboxyamide)-2'-deoxyuridine
  misc_feature (20)..(20): n is 5-(N-benzylcarboxyamide)-2'-deoxyuridine
  misc_feature (21)..(21): n is 2'-O-methyl-adenosine
  misc_feature (24)..(24): n is 2'-O-methyl-guanosine
nnncngnnacncgcgnnnanngcn

SEQ ID NO: 159 - DNA, 24 bp, Artificial Sequence
  Synthetic
  misc_feature (1)..(2): n is 5-(N-benzylcarboxyamide)-2'-deoxyuridine
  misc_feature (3)..(3): n is 2'-O-methyl-adenosine
  misc_feature (5)..(5): n is hexaethylene glycol
  misc_feature (7)..(7): n is 5-(N-benzylcarboxyamide)-2'-deoxyuridine
  misc_feature (8)..(8): n is 5-[N-(1-naphthyl-2-ethyl)carboxyamide]-2'-deoxyuridine
  misc_feature (11)..(11): n is 2'-O-methyl-adenosine
  misc_feature (16)..(18): n is 5-(N-benzylcarboxyamide)-2'-deoxyuridine
  misc_feature (20)..(20): n is 5-(N-benzylcarboxyamide)-2'-deoxyuridine
  misc_feature (21)..(21): n is 2'-O-methyl-adenosine
  misc_feature (24)..(24): n is 2'-O-methyl-guanosine
nnncngnnacncgcgnnnanngcn

SEQ ID NO: 160 - DNA, 24 bp, Artificial Sequence
  Synthetic
  misc_feature (1)..(2): n is 5-(N-benzylcarboxyamide)-2'-deoxyuridine
  misc_feature (3)..(3): n is 2'-O-methyl-adenosine
  misc_feature (5)..(5): n is hexaethylene glycol
  misc_feature (7)..(8): n is 5-(N-benzylcarboxyamide)-2'-deoxyuridine
  misc_feature (11)..(11): n is 2'-O-methyl-adenosine
  misc_feature (16)..(16): n is 5-[N-(1-naphthyl-2-ethyl)carboxyamide]-2'-deoxyuridine
  misc_feature (17)..(18): n is 5-(N-benzylcarboxyamide)-2'-deoxyuridine
  misc_feature (20)..(20): n is 5-(N-benzylcarboxyamide)-2'-deoxyuridine
  misc_feature (21)..(21): n is 2'-O-methyl-adenosine
  misc_feature (24)..(24): n is 2'-O-methyl-guanosine
nnncngnnacncgcgnnnanngcn

SEQ ID NO: 161 - DNA, 24 bp, Artificial Sequence
  Synthetic
  misc_feature (1)..(2): n is 5-(N-benzylcarboxyamide)-2'-deoxyuridine
  misc_feature (3)..(3): n is 2'-O-methyl-adenosine
  misc_feature (5)..(5): n is hexaethylene glycol
  misc_feature (7)..(8): n is 5-(N-benzylcarboxyamide)-2'-deoxyuridine
  misc_feature (11)..(11): n is 2'-O-methyl-adenosine
  misc_feature (16)..(16): n is 5-(N-benzylcarboxyamide)-2'-deoxyuridine
  misc_feature (17)..(17): n is 5-[N-(1-naphthyl-2-ethyl)carboxyamide]-2'-deoxyuridine
  misc_feature (18)..(18): n is 5-(N-benzylcarboxyamide)-2'-deoxyuridine
  misc_feature (20)..(20): n is 5-(N-benzylcarboxyamide)-2'-deoxyuridine
  misc_feature (21)..(21): n is 2'-O-methyl-adenosine
  misc_feature (24)..(24): n is 2'-O-methyl-guanosine
nnncngnnacncgcgnnnanngcn

SEQ ID NO: 162 - DNA, 24 bp, Artificial Sequence
  Synthetic
  misc_feature (1)..(2): n is 5-(N-benzylcarboxyamide)-2'-deoxyuridine
  misc_feature (3)..(3): n is 2'-O-methyl-adenosine
  misc_feature (5)..(5): n is hexaethylene glycol
  misc_feature (7)..(8): n is 5-(N-benzylcarboxyamide)-2'-deoxyuridine
  misc_feature (11)..(11): n is 2'-O-methyl-adenosine
  misc_feature (16)..(17): n is 5-(N-benzylcarboxyamide)-2'-deoxyuridine
  misc_feature (18)..(18): n is 5-[N-(1-naphthyl-2-ethyl)carboxyamide]-2'-deoxyuridine
  misc_feature (20)..(20): n is 5-(N-benzylcarboxyamide)-2'-deoxyuridine
  misc_feature (21)..(21): n is 2'-O-methyl-adenosine
  misc_feature (24)..(24): n is 2'-O-methyl-guanosine
nnncngnnacncgcgnnnanngcn

SEQ ID NO: 163 - DNA, 24 bp, Artificial Sequence
  Synthetic
  misc_feature (1)..(2): n is 5-(N-benzylcarboxyamide)-2'-deoxyuridine
  misc_feature (3)..(3): n is 2'-O-methyl-adenosine
  misc_feature (5)..(5): n is hexaethylene glycol
  misc_feature (7)..(8): n is 5-(N-benzylcarboxyamide)-2'-deoxyuridine
  misc_feature (11)..(11): n is 2'-O-methyl-adenosine
  misc_feature (16)..(18): n is 5-(N-benzylcarboxyamide)-2'-deoxyuridine
  misc_feature (20)..(20): n is 5-[N-(1-naphthyl-2-ethyl)carboxyamide]-2'-deoxyuridine
  misc_feature (21)..(21): n is 2'-O-methyl-adenosine
  misc_feature (24)..(24): n is 2'-O-methyl-guanosine
nnncngnnacncgcgnnnanngcn

SEQ ID NO: 164 - DNA, 24 bp, Artificial Sequence
  Synthetic
  misc_feature (1)..(1): n is 5-[N-(3,4-methylenedioxyphenyl-methyl)carboxyamide]-2'-deoxyuridi ne
  misc_feature (2)..(2): n is 5-(N-benzylcarboxyamide)-2'-deoxyuridine
  misc_feature (3)..(3): n is 2'-O-methyl-adenosine
  misc_feature (5)..(5): n is hexaethylene glycol
  misc_feature (7)..(8): n is 5-(N-benzylcarboxyamide)-2'-deoxyuridine
  misc_feature (11)..(11): n is 2'-O-methyl-adenosine
  misc_feature (16)..(18): n is 5-(N-benzylcarboxyamide)-2'-deoxyuridine
  misc_feature (20)..(20): n is 5-(N-benzylcarboxyamide)-2'-deoxyuridine
  misc_feature (21)..(21): n is 2'-O-methyl-adenosine
  misc_feature (24)..(24): n is 2'-O-methyl-guanosine
nnncngnnacncgcgnnnanngcn

SEQ ID NO: 165 - DNA, 24 bp, Artificial Sequence
  Synthetic
  misc_feature (1)..(1): n is 5-(N-benzylcarboxyamide)-2'-deoxyuridine
  misc_feature (2)..(2): n is 5-[N-(3,4-methylenedioxyphenyl-methyl)carboxyamide]-2'-deoxyuridi ne
  misc_feature (3)..(3): n is 2'-O-methyl-adenosine
  misc_feature (5)..(5): n is hexaethylene glycol
  misc_feature (7)..(8): n is 5-(N-benzylcarboxyamide)-2'-deoxyuridine
  misc_feature (11)..(11): n is 2'-O-methyl-adenosine
  misc_feature (16)..(18): n is 5-(N-benzylcarboxyamide)-2'-deoxyuridine
  misc_feature (20)..(20): n is 5-(N-benzylcarboxyamide)-2'-deoxyuridine
  misc_feature (21)..(21): n is 2'-O-methyl-adenosine
  misc_feature (24)..(24): n is 2'-O-methyl-guanosine
nnncngnnacncgcgnnnanngcn

SEQ ID NO: 166 - DNA, 24 bp, Artificial Sequence
  Synthetic
  misc_feature (1)..(2): n is 5-(N-benzylcarboxyamide)-2'-deoxyuridine
  misc_feature (3)..(3): n is 2'-O-methyl-adenosine
  misc_feature (5)..(5): n is hexaethylene glycol
  misc_feature (7)..(7): n is 5-[N-(3,4-methylenedioxyphenyl-methyl)carboxyamide]-2'-deoxyuridi ne
  misc_feature (8)..(8): n is 5-(N-benzylcarboxyamide)-2'-deoxyuridine
  misc_feature (11)..(11): n is 2'-O-methyl-adenosine
  misc_feature (16)..(18): n is 5-(N-benzylcarboxyamide)-2'-deoxyuridine
  misc_feature (20)..(20): n is 5-(N-benzylcarboxyamide)-2'-deoxyuridine
  misc_feature (21)..(21): n is 2'-O-methyl-adenosine
  misc_feature (24)..(24): n is 2'-O-methyl-guanosine
nnncngnnacncgcgnnnanngcn

SEQ ID NO: 167 - DNA, 24 bp, Artificial Sequence
  Synthetic
  misc_feature (1)..(2): n is 5-(N-benzylcarboxyamide)-2'-deoxyuridine
  misc_feature (3)..(3): n is 2'-O-methyl-adenosine
  misc_feature (5)..(5): n is hexaethylene glycol
  misc_feature (7)..(7): n is 5-(N-benzylcarboxyamide)-2'-deoxyuridine
  misc_feature (8)..(8): n is 5-[N-(3,4-methylenedioxyphenyl-methyl)carboxyamide]-2'-deoxyuridi ne
  misc_feature (11)..(11): n is 2'-O-methyl-adenosine
  misc_feature (16)..(18): n is 5-(N-benzylcarboxyamide)-2'-deoxyuridine
  misc_feature (20)..(20): n is 5-(N-benzylcarboxyamide)-2'-deoxyuridine
  misc_feature (21)..(21): n is 2'-O-methyl-adenosine
  misc_feature (24)..(24): n is 2'-O-methyl-guanosine
nnncngnnacncgcgnnnanngcn

SEQ ID NO: 168 - DNA, 24 bp, Artificial Sequence
  Synthetic
  misc_feature (1)..(2): n is 5-(N-benzylcarboxyamide)-2'-deoxyuridine
  misc_feature (3)..(3): n is 2'-O-methyl-adenosine
  misc_feature (5)..(5): n is hexaethylene glycol
  misc_feature (7)..(8): n is 5-(N-benzylcarboxyamide)-2'-deoxyuridine
  misc_feature (11)..(11): n is 2'-O-methyl-adenosine
  misc_feature (16)..(16): n is 5-[N-(3,4-methylenedioxyphenyl-methyl)carboxyamide]-2'-deoxyuridi ne
  misc_feature (17)..(18): n is 5-(N-benzylcarboxyamide)-2'-deoxyuridine
  misc_feature (20)..(20): n is 5-(N-benzylcarboxyamide)-2'-deoxyuridine
  misc_feature (21)..(21): n is 2'-O-methyl-adenosine
  misc_feature (24)..(24): n is 2'-O-methyl-guanosine
nnncngnnacncgcgnnnanngcn

SEQ ID NO: 169 - DNA, 24 bp, Artificial Sequence
  Synthetic
  misc_feature (1)..(2): n is 5-(N-benzylcarboxyamide)-2'-deoxyuridine
  misc_feature (3)..(3): n is 2'-O-methyl-adenosine
  misc_feature (5)..(5): n is hexaethylene glycol
  misc_feature (7)..(8): n is 5-(N-benzylcarboxyamide)-2'-deoxyuridine
  misc_feature (11)..(11): n is 2'-O-methyl-adenosine
  misc_feature (16)..(16): n is 5-(N-benzylcarboxyamide)-2'-deoxyuridine
  misc_feature (17)..(17): n is 5-[N-(3,4-methylenedioxyphenyl-methyl)carboxyamide]-2'-deoxyuridi ne
  misc_feature (18)..(18): n is 5-(N-benzylcarboxyamide)-2'-deoxyuridine
  misc_feature (20)..(20): n is 5-(N-benzylcarboxyamide)-2'-deoxyuridine
  misc_feature (21)..(21): n is 2'-O-methyl-adenosine
  misc_feature (24)..(24): n is 2'-O-methyl-guanosine
nnncngnnacncgcgnnnanngcn

SEQ ID NO: 170 - DNA, 24 bp, Artificial Sequence
  Synthetic
  misc_feature (1)..(2): n is 5-(N-benzylcarboxyamide)-2'-deoxyuridine
  misc_feature (3)..(3): n is 2'-O-methyl-adenosine
  misc_feature (5)..(5): n is hexaethylene glycol
  misc_feature (7)..(8): n is 5-(N-benzylcarboxyamide)-2'-deoxyuridine
  misc_feature (11)..(11): n is 2'-O-methyl-adenosine
  misc_feature (16)..(17): n is 5-(N-benzylcarboxyamide)-2'-deoxyuridine
  misc_feature (18)..(18): n is 5-[N-(3,4-methylenedioxyphenyl-methyl)carboxyamide]-2'-deoxyuridi ne
  misc_feature (20)..(20): n is 5-(N-benzylcarboxyamide)-2'-deoxyuridine
  misc_feature (21)..(21): n is 2'-O-methyl-adenosine
  misc_feature (24)..(24): n is 2'-O-methyl-guanosine
nnncngnnacncgcgnnnanngcn

SEQ ID NO: 171 - DNA, 24 bp, Artificial Sequence
  Synthetic
  misc_feature (1)..(2): n is 5-(N-benzylcarboxyamide)-2'-deoxyuridine
  misc_feature (3)..(3): n is 2'-O-methyl-adenosine
  misc_feature (5)..(5): n is hexaethylene glycol
  misc_feature (7)..(8): n is 5-(N-benzylcarboxyamide)-2'-deoxyuridine
  misc_feature (11)..(11): n is 2'-O-methyl-adenosine
  misc_feature (16)..(18): n is 5-(N-benzylcarboxyamide)-2'-deoxyuridine
  misc_feature (20)..(20): n is 5-[N-(3,4-methylenedioxyphenyl-methyl)carboxyamide]-2'-deoxyuridi ne
  misc_feature (21)..(21): n is 2'-O-methyl-adenosine
  misc_feature (24)..(24): n is 2'-O-methyl-guanosine
nnncngnnacncgcgnnnanngcn

SEQ ID NO: 172 - DNA, 24 bp, Artificial Sequence
  Synthetic
  misc_feature (1)..(1): n is 5-[N-(phenyl-3-propyl)-carboxyamide]-2'-deoxyuridine
  misc_feature (2)..(2): n is 5-(N-benzylcarboxyamide)-2'-deoxyuridine
  misc_feature (3)..(3): n is 2'-O-methyl-adenosine
  misc_feature (5)..(5): n is hexaethylene glycol
  misc_feature (7)..(8): n is 5-(N-benzylcarboxyamide)-2'-deoxyuridine
  misc_feature (11)..(11): n is 2'-O-methyl-adenosine
  misc_feature (16)..(18): n is 5-(N-benzylcarboxyamide)-2'-deoxyuridine
  misc_feature (20)..(20): n is 5-(N-benzylcarboxyamide)-2'-deoxyuridine
  misc_feature (21)..(21): n is 2'-O-methyl-adenosine
  misc_feature (24)..(24): n is 2'-O-methyl-guanosine
nnncngnnacncgcgnnnanngcn

SEQ ID NO: 173 - DNA, 24 bp, Artificial Sequence
  Synthetic
  misc_feature (1)..(1): n is 5-(N-benzylcarboxyamide)-2'-deoxyuridine
  misc_feature (2)..(2): n is 5-[N-(phenyl-3-propyl)-carboxyamide]-2'-deoxyuridine
  misc_feature (3)..(3): n is 2'-O-methyl-adenosine
  misc_feature (5)..(5): n is hexaethylene glycol
  misc_feature (7)..(8): n is 5-(N-benzylcarboxyamide)-2'-deoxyuridine
  misc_feature (11)..(11): n is 2'-O-methyl-adenosine
  misc_feature (16)..(18): n is 5-(N-benzylcarboxyamide)-2'-deoxyuridine
  misc_feature (20)..(20): n is 5-(N-benzylcarboxyamide)-2'-deoxyuridine
  misc_feature (21)..(21): n is 2'-O-methyl-adenosine
  misc_feature (24)..(24): n is 2'-O-methyl-guanosine
nnncngnnacncgcgnnnanngcn

SEQ ID NO: 174 - DNA, 24 bp, Artificial Sequence
  Synthetic
  misc_feature (1)..(2): n is 5-(N-benzylcarboxyamide)-2'-deoxyuridine
  misc_feature (3)..(3): n is 2'-O-methyl-adenosine
  misc_feature (5)..(5): n is hexaethylene glycol
  misc_feature (7)..(7): n is 5-[N-(phenyl-3-propyl)-carboxyamide]-2'-deoxyuridine
  misc_feature (8)..(8): n is 5-(N-benzylcarboxyamide)-2'-deoxyuridine
  misc_feature (11)..(11): n is 2'-O-methyl-adenosine
  misc_feature (16)..(18): n is 5-(N-benzylcarboxyamide)-2'-deoxyuridine
  misc_feature (20)..(20): n is 5-(N-benzylcarboxyamide)-2'-deoxyuridine
  misc_feature (21)..(21): n is 2'-O-methyl-adenosine
  misc_feature (24)..(24): n is 2'-O-methyl-guanosine
nnncngnnacncgcgnnnanngcn

SEQ ID NO: 175 - DNA, 24 bp, Artificial Sequence
  Synthetic
  misc_feature (1)..(2): n is 5-(N-benzylcarboxyamide)-2'-deoxyuridine
  misc_feature (3)..(3): n is 2'-O-methyl-adenosine
  misc_feature (5)..(5): n is hexaethylene glycol
  misc_feature (7)..(7): n is 5-(N-benzylcarboxyamide)-2'-deoxyuridine
  misc_feature (8)..(8): n is 5-[N-(phenyl-3-propyl)-carboxyamide]-2'-deoxyuridine
  misc_feature (11)..(11): n is 2'-O-methyl-adenosine
  misc_feature (16)..(18): n is 5-(N-benzylcarboxyamide)-2'-deoxyuridine
  misc_feature (20)..(20): n is 5-(N-benzylcarboxyamide)-2'-deoxyuridine
  misc_feature (21)..(21): n is 2'-O-methyl-adenosine
  misc_feature (24)..(24): n is 2'-O-methyl-guanosine
nnncngnnacncgcgnnnanngcn

SEQ ID NO: 176 - DNA, 24 bp, Artificial Sequence
  Synthetic
  misc_feature (1)..(2): n is 5-(N-benzylcarboxyamide)-2'-deoxyuridine
  misc_feature (3)..(3): n is 2'-O-methyl-adenosine
  misc_feature (5)..(5): n is hexaethylene glycol
  misc_feature (7)..(8): n is 5-(N-benzylcarboxyamide)-2'-deoxyuridine
  misc_feature (11)..(11): n is 2'-O-methyl-adenosine
  misc_feature (16)..(16): n is 5-[N-(phenyl-3-propyl)-carboxyamide]-2'-deoxyuridine
  misc_feature (17)..(18): n is 5-(N-benzylcarboxyamide)-2'-deoxyuridine
  misc_feature (20)..(20): n is 5-(N-benzylcarboxyamide)-2'-deoxyuridine
  misc_feature (21)..(21): n is 2'-O-methyl-adenosine
  misc_feature (24)..(24): n is 2'-O-methyl-guanosine
nnncngnnacncgcgnnnanngcn

SEQ ID NO: 177 - DNA, 24 bp, Artificial Sequence
  Synthetic
  misc_feature (1)..(2): n is 5-(N-benzylcarboxyamide)-2'-deoxyuridine
  misc_feature (3)..(3): n is 2'-O-methyl-adenosine
  misc_feature (5)..(5): n is hexaethylene glycol
  misc_feature (7)..(8): n is 5-(N-benzylcarboxyamide)-2'-deoxyuridine
  misc_feature (11)..(11): n is 2'-O-methyl-adenosine
  misc_feature (16)..(16): n is 5-(N-benzylcarboxyamide)-2'-deoxyuridine
  misc_feature (17)..(17): n is 5-[N-(phenyl-3-propyl)-carboxyamide]-2'-deoxyuridine
  misc_feature (18)..(18): n is 5-(N-benzylcarboxyamide)-2'-deoxyuridine
  misc_feature (20)..(20): n is 5-(N-benzylcarboxyamide)-2'-deoxyuridine
  misc_feature (21)..(21): n is 2'-O-methyl-adenosine
  misc_feature (24)..(24): n is 2'-O-methyl-guanosine
nnncngnnacncgcgnnnanngcn

SEQ ID NO: 178 - DNA, 24 bp, Artificial Sequence
  Synthetic
  misc_feature (1)..(2): n is 5-(N-benzylcarboxyamide)-2'-deoxyuridine
  misc_feature (3)..(3): n is 2'-O-methyl-adenosine
  misc_feature (5)..(5): n is hexaethylene glycol
  misc_feature (7)..(8): n is 5-(N-benzylcarboxyamide)-2'-deoxyuridine
  misc_feature (11)..(11): n is 2'-O-methyl-adenosine
  misc_feature (16)..(17): n is 5-(N-benzylcarboxyamide)-2'-deoxyuridine
  misc_feature (18)..(18): n is 5-[N-(phenyl-3-propyl)-carboxyamide]-2'-deoxyuridine
  misc_feature (20)..(20): n is 5-(N-benzylcarboxyamide)-2'-deoxyuridine
  misc_feature (21)..(21): n is 2'-O-methyl-adenosine
  misc_feature (24)..(24): n is 2'-O-methyl-guanosine
nnncngnnacncgcgnnnanngcn

SEQ ID NO: 179 - DNA, 24 bp, Artificial Sequence
  Synthetic
  misc_feature (1)..(2): n is 5-(N-benzylcarboxyamide)-2'-deoxyuridine
  misc_feature (3)..(3): n is 2'-O-methyl-adenosine
  misc_feature (5)..(5): n is hexaethylene glycol
  misc_feature (7)..(8): n is 5-(N-benzylcarboxyamide)-2'-deoxyuridine
  misc_feature (11)..(11): n is 2'-O-methyl-adenosine
  misc_feature (16)..(18): n is 5-(N-benzylcarboxyamide)-2'-deoxyuridine
  misc_feature (20)..(20): n is 5-[N-(phenyl-3-propyl)-carboxyamide]-2'-deoxyuridine
  misc_feature (21)..(21): n is 2'-O-methyl-adenosine
  misc_feature (24)..(24): n is 2'-O-methyl-guanosine
nnncngnnacncgcgnnnanngcn

SEQ ID NO: 180 - DNA, 24 bp, Artificial Sequence
  Synthetic
  misc_feature (1)..(1): n is 5-[N-(4-hydroxyphenyl-2-ethyl)carboxyamide]-2'-deoxyuridine
  misc_feature (2)..(2): n is 5-(N-benzylcarboxyamide)-2'-deoxyuridine
  misc_feature (3)..(3): n is 2'-O-methyl-adenosine
  misc_feature (5)..(5): n is hexaethylene glycol
  misc_feature (7)..(8): n is 5-(N-benzylcarboxyamide)-2'-deoxyuridine
  misc_feature (11)..(11): n is 2'-O-methyl-adenosine
  misc_feature (16)..(18): n is 5-(N-benzylcarboxyamide)-2'-deoxyuridine
  misc_feature (20)..(20): n is 5-(N-benzylcarboxyamide)-2'-deoxyuridine
  misc_feature (21)..(21): n is 2'-O-methyl-adenosine
  misc_feature (24)..(24): n is 2'-O-methyl-guanosine
nnncngnnacncgcgnnnanngcn

SEQ ID NO: 181 - DNA, 24 bp, Artificial Sequence
  Synthetic
  misc_feature (1)..(1): n is 5-(N-benzylcarboxyamide)-2'-deoxyuridine
  misc_feature (2)..(2): n is 5-[N-(4-hydroxyphenyl-2-ethyl)carboxyamide]-2'-deoxyuridine
  misc_feature (3)..(3): n is 2'-O-methyl-adenosine
  misc_feature (5)..(5): n is hexaethylene glycol
  misc_feature (7)..(8): n is 5-(N-benzylcarboxyamide)-2'-deoxyuridine
  misc_feature (11)..(11): n is 2'-O-methyl-adenosine
  misc_feature (16)..(18): n is 5-(N-benzylcarboxyamide)-2'-deoxyuridine
  misc_feature (20)..(20): n is 5-(N-benzylcarboxyamide)-2'-deoxyuridine
  misc_feature (21)..(21): n is 2'-O-methyl-adenosine
  misc_feature (24)..(24): n is 2'-O-methyl-guanosine
nnncngnnacncgcgnnnanngcn

SEQ ID NO: 182 - DNA, 24 bp, Artificial Sequence
  Synthetic
  misc_feature (1)..(2): n is 5-(N-benzylcarboxyamide)-2'-deoxyuridine
  misc_feature (3)..(3): n is 2'-O-methyl-adenosine
  misc_feature (5)..(5): n is hexaethylene glycol
  misc_feature (7)..(7): n is 5-[N-(4-hydroxyphenyl-2-ethyl)carboxyamide]-2'-deoxyuridine
  misc_feature (8)..(8): n is 5-(N-benzylcarboxyamide)-2'-deoxyuridine
  misc_feature (11)..(11): n is 2'-O-methyl-adenosine
  misc_feature (16)..(18): n is 5-(N-benzylcarboxyamide)-2'-deoxyuridine
  misc_feature (20)..(20): n is 5-(N-benzylcarboxyamide)-2'-deoxyuridine
  misc_feature (21)..(21): n is 2'-O-methyl-adenosine
  misc_feature (24)..(24): n is 2'-O-methyl-guanosine
nnncngnnacncgcgnnnanngcn

SEQ ID NO: 183 - DNA, 24 bp, Artificial Sequence
  Synthetic
  misc_feature (1)..(2): n is 5-(N-benzylcarboxyamide)-2'-deoxyuridine
  misc_feature (3)..(3): n is 2'-O-methyl-adenosine
  misc_feature (5)..(5): n is hexaethylene glycol
  misc_feature (7)..(7): n is 5-(N-benzylcarboxyamide)-2'-deoxyuridine
  misc_feature (8)..(8): n is 5-[N-(4-hydroxyphenyl-2-ethyl)carboxyamide]-2'-deoxyuridine
  misc_feature (11)..(11): n is 2'-O-methyl-adenosine
  misc_feature (16)..(18): n is 5-(N-benzylcarboxyamide)-2'-deoxyuridine
  misc_feature (20)..(20): n is 5-(N-benzylcarboxyamide)-2'-deoxyuridine
  misc_feature (21)..(21): n is 2'-O-methyl-adenosine
  misc_feature (24)..(24): n is 2'-O-methyl-guanosine
nnncngnnacncgcgnnnanngcn

SEQ ID NO: 184 - DNA, 24 bp, Artificial Sequence
  Synthetic
  misc_feature (1)..(2): n is 5-(N-benzylcarboxyamide)-2'-deoxyuridine
  misc_feature (3)..(3): n is 2'-O-methyl-adenosine
  misc_feature (5)..(5): n is hexaethylene glycol
  misc_feature (7)..(8): n is 5-(N-benzylcarboxyamide)-2'-deoxyuridine
  misc_feature (11)..(11): n is 2'-O-methyl-adenosine
  misc_feature (16)..(16): n is 5-[N-(4-hydroxyphenyl-2-ethyl)carboxyamide]-2'-deoxyuridine
  misc_feature (17)..(18): n is 5-(N-benzylcarboxyamide)-2'-deoxyuridine
  misc_feature (20)..(20): n is 5-(N-benzylcarboxyamide)-2'-deoxyuridine
  misc_feature (21)..(21): n is 2'-O-methyl-adenosine
  misc_feature (24)..(24): n is 2'-O-methyl-guanosine
nnncngnnacncgcgnnnanngcn

SEQ ID NO: 185 - DNA, 24 bp, Artificial Sequence
  Synthetic
  misc_feature (1)..(2): n is 5-(N-benzylcarboxyamide)-2'-deoxyuridine
  misc_feature (3)..(3): n is 2'-O-methyl-adenosine
  misc_feature (5)..(5): n is hexaethylene glycol
  misc_feature (7)..(8): n is 5-(N-benzylcarboxyamide)-2'-deoxyuridine
  misc_feature (11)..(11): n is 2'-O-methyl-adenosine
  misc_feature (16)..(16): n is 5-(N-benzylcarboxyamide)-2'-deoxyuridine
  misc_feature (17)..(17): n is 5-[N-(4-hydroxyphenyl-2-ethyl)carboxyamide]-2'-deoxyuridine
  misc_feature (18)..(18): n is 5-(N-benzylcarboxyamide)-2'-deoxyuridine
  misc_feature (20)..(20): n is 5-(N-benzylcarboxyamide)-2'-deoxyuridine
  misc_feature (21)..(21): n is 2'-O-methyl-adenosine
  misc_feature (24)..(24): n is 2'-O-methyl-guanosine
nnncngnnacncgcgnnnanngcn

SEQ ID NO: 186 - DNA, 24 bp, Artificial Sequence
  Synthetic
  misc_feature (1)..(2): n is 5-(N-benzylcarboxyamide)-2'-deoxyuridine
  misc_feature (3)..(3): n is 2'-O-methyl-adenosine
  misc_feature (5)..(5): n is hexaethylene glycol
  misc_feature (7)..(8): n is 5-(N-benzylcarboxyamide)-2'-deoxyuridine
  misc_feature (11)..(11): n is 2'-O-methyl-adenosine
  misc_feature (16)..(17): n is 5-(N-benzylcarboxyamide)-2'-deoxyuridine
  misc_feature (18)..(18): n is 5-[N-(4-hydroxyphenyl-2-ethyl)carboxyamide]-2'-deoxyuridine
  misc_feature (20)..(20): n is 5-(N-benzylcarboxyamide)-2'-deoxyuridine
  misc_feature (21)..(21): n is 2'-O-methyl-adenosine
  misc_feature (24)..(24): n is 2'-O-methyl-guanosine
nnncngnnacncgcgnnnanngcn

SEQ ID NO: 187 - DNA, 24 bp, Artificial Sequence
  Synthetic
  misc_feature (1)..(2): n is 5-(N-benzylcarboxyamide)-2'-deoxyuridine
  misc_feature (3)..(3): n is 2'-O-methyl-adenosine
  misc_feature (5)..(5): n is hexaethylene glycol
  misc_feature (7)..(8): n is 5-(N-benzylcarboxyamide)-2'-deoxyuridine
  misc_feature (11)..(11): n is 2'-O-methyl-adenosine
  misc_feature (16)..(18): n is 5-(N-benzylcarboxyamide)-2'-deoxyuridine
  misc_feature (20)..(20): n is 5-[N-(4-hydroxyphenyl-2-ethyl)carboxyamide]-2'-deoxyuridine
  misc_feature (21)..(21): n is 2'-O-methyl-adenosine
  misc_feature (24)..(24): n is 2'-O-methyl-guanosine
nnncngnnacncgcgnnnanngcn

SEQ ID NO: 188 - DNA, 24 bp, Artificial Sequence
  Synthetic
  misc_feature (1)..(1): n is 5-[N-(4-fluorobenzyl)carboxyamide]-2'-deoxyuridine
  misc_feature (2)..(2): n is 5-(N-benzylcarboxyamide)-2'-deoxyuridine
  misc_feature (3)..(3): n is 2'-O-methyl-adenosine
  misc_feature (5)..(5): n is hexaethylene glycol
  misc_feature (7)..(8): n is 5-(N-benzylcarboxyamide)-2'-deoxyuridine
  misc_feature (11)..(11): n is 2'-O-methyl-adenosine
  misc_feature (16)..(18): n is 5-(N-benzylcarboxyamide)-2'-deoxyuridine
  misc_feature (20)..(20): n is 5-(N-benzylcarboxyamide)-2'-deoxyuridine
  misc_feature (21)..(21): n is 2'-O-methyl-adenosine
  misc_feature (24)..(24): n is 2'-O-methyl-guanosine
nnncngnnacncgcgnnnanngcn

SEQ ID NO: 189 - DNA, 24 bp, Artificial Sequence
  Synthetic
  misc_feature (1)..(1): n is 5-(N-benzylcarboxyamide)-2'-deoxyuridine
  misc_feature (2)..(2): n is 5-[N-(4-fluorobenzyl)carboxyamide]-2'-deoxyuridine
  misc_feature (3)..(3): n is 2'-O-methyl-adenosine
  misc_feature (5)..(5): n is hexaethylene glycol
  misc_feature (7)..(8): n is 5-(N-benzylcarboxyamide)-2'-deoxyuridine
  misc_feature (11)..(11): n is 2'-O-methyl-adenosine
  misc_feature (16)..(18): n is 5-(N-benzylcarboxyamide)-2'-deoxyuridine
  misc_feature (20)..(20): n is 5-(N-benzylcarboxyamide)-2'-deoxyuridine
  misc_feature (21)..(21): n is 2'-O-methyl-adenosine
  misc_feature (24)..(24): n is 2'-O-methyl-guanosine
nnncngnnacncgcgnnnanngcn

SEQ ID NO: 190 - DNA, 24 bp, Artificial Sequence
  Synthetic
  misc_feature (1)..(2): n is 5-(N-benzylcarboxyamide)-2'-deoxyuridine
  misc_feature (3)..(3): n is 2'-O-methyl-adenosine
  misc_feature (5)..(5): n is hexaethylene glycol
  misc_feature (7)..(7): n is 5-[N-(4-fluorobenzyl)carboxyamide]-2'-deoxyuridine
  misc_feature (8)..(8): n is 5-(N-benzylcarboxyamide)-2'-deoxyuridine
  misc_feature (11)..(11): n is 2'-O-methyl-adenosine
  misc_feature (16)..(18): n is 5-(N-benzylcarboxyamide)-2'-deoxyuridine
  misc_feature (20)..(20): n is 5-(N-benzylcarboxyamide)-2'-deoxyuridine
  misc_feature (21)..(21): n is 2'-O-methyl-adenosine
  misc_feature (24)..(24): n is 2'-O-methyl-guanosine
nnncngnnacncgcgnnnanngcn

SEQ ID NO: 191 - DNA, 24 bp, Artificial Sequence
  Synthetic
  misc_feature (1)..(2): n is 5-(N-benzylcarboxyamide)-2'-deoxyuridine
  misc_feature (3)..(3): n is 2'-O-methyl-adenosine
  misc_feature (5)..(5): n is hexaethylene glycol
  misc_feature (7)..(7): n is 5-(N-benzylcarboxyamide)-2'-deoxyuridine
  misc_feature (8)..(8): n is 5-[N-(4-fluorobenzyl)carboxyamide]-2'-deoxyuridine
  misc_feature (11)..(11): n is 2'-O-methyl-adenosine
  misc_feature (16)..(18): n is 5-(N-benzylcarboxyamide)-2'-deoxyuridine
  misc_feature (20)..(20): n is 5-(N-benzylcarboxyamide)-2'-deoxyuridine
  misc_feature (21)..(21): n is 2'-O-methyl-adenosine
  misc_feature (24)..(24): n is 2'-O-methyl-guanosine
nnncngnnacncgcgnnnanngcn

SEQ ID NO: 192 - DNA, 24 bp, Artificial Sequence
  Synthetic
  misc_feature (1)..(2): n is 5-(N-benzylcarboxyamide)-2'-deoxyuridine
  misc_feature (3)..(3): n is 2'-O-methyl-adenosine
  misc_feature (5)..(5): n is hexaethylene glycol
  misc_feature (7)..(8): n is 5-(N-benzylcarboxyamide)-2'-deoxyuridine
  misc_feature (11)..(11): n is 2'-O-methyl-adenosine
  misc_feature (16)..(16): n is 5-[N-(4-fluorobenzyl)carboxyamide]-2'-deoxyuridine
  misc_feature (17)..(18): n is 5-(N-benzylcarboxyamide)-2'-deoxyuridine
  misc_feature (20)..(20): n is 5-(N-benzylcarboxyamide)-2'-deoxyuridine
  misc_feature (21)..(21): n is 2'-O-methyl-adenosine
  misc_feature (24)..(24): n is 2'-O-methyl-guanosine
nnncngnnacncgcgnnnanngcn

SEQ ID NO: 193 - DNA, 24 bp, Artificial Sequence
  Synthetic
  misc_feature (1)..(2): n is 5-(N-benzylcarboxyamide)-2'-deoxyuridine
  misc_feature (3)..(3): n is 2'-O-methyl-adenosine
  misc_feature (5)..(5): n is hexaethylene glycol
  misc_feature (7)..(8): n is 5-(N-benzylcarboxyamide)-2'-deoxyuridine
  misc_feature (11)..(11): n is 2'-O-methyl-adenosine
  misc_feature (16)..(16): n is 5-(N-benzylcarboxyamide)-2'-deoxyuridine
  misc_feature (17)..(17): n is 5-[N-(4-fluorobenzyl)carboxyamide]-2'-deoxyuridine
  misc_feature (18)..(18): n is 5-(N-benzylcarboxyamide)-2'-deoxyuridine
  misc_feature (20)..(20): n is 5-(N-benzylcarboxyamide)-2'-deoxyuridine
  misc_feature (21)..(21): n is 2'-O-methyl-adenosine
  misc_feature (24)..(24): n is 2'-O-methyl-guanosine
nnncngnnacncgcgnnnanngcn

SEQ ID NO: 194 - DNA, 24 bp, Artificial Sequence
  Synthetic
  misc_feature (1)..(2): n is 5-(N-benzylcarboxyamide)-2'-deoxyuridine
  misc_feature (3)..(3): n is 2'-O-methyl-adenosine
  misc_feature (5)..(5): n is hexaethylene glycol
  misc_feature (7)..(8): n is 5-(N-benzylcarboxyamide)-2'-deoxyuridine
  misc_feature (11)..(11): n is 2'-O-methyl-adenosine
  misc_feature (16)..(17): n is 5-(N-benzylcarboxyamide)-2'-deoxyuridine
  misc_feature (18)..(18): n is 5-[N-(4-fluorobenzyl)carboxyamide]-2'-deoxyuridine
  misc_feature (20)..(20): n is 5-(N-benzylcarboxyamide)-2'-deoxyuridine
  misc_feature (21)..(21): n is 2'-O-methyl-adenosine
  misc_feature (24)..(24): n is 2'-O-methyl-guanosine
nnncngnnacncgcgnnnanngcn

SEQ ID NO: 195 - DNA, 24 bp, Artificial Sequence
  Synthetic
  misc_feature (1)..(2): n is 5-(N-benzylcarboxyamide)-2'-deoxyuridine
  misc_feature (3)..(3): n is 2'-O-methyl-adenosine
  misc_feature (5)..(5): n is hexaethylene glycol
  misc_feature (7)..(8): n is 5-(N-benzylcarboxyamide)-2'-deoxyuridine
  misc_feature (11)..(11): n is 2'-O-methyl-adenosine
  misc_feature (16)..(18): n is 5-(N-benzylcarboxyamide)-2'-deoxyuridine
  misc_feature (20)..(20): n is 5-[N-(4-fluorobenzyl)carboxyamide]-2'-deoxyuridine
  misc_feature (21)..(21): n is 2'-O-methyl-adenosine
  misc_feature (24)..(24): n is 2'-O-methyl-guanosine
nnncngnnacncgcgnnnanngcn

SEQ ID NO: 196 - DNA, 24 bp, Artificial Sequence
  Synthetic
  misc_feature (1)..(2): n is 5-(N-benzylcarboxyamide)-2'-deoxyuridine
  misc_feature (3)..(3): n is 2'-O-methyl-adenosine
  misc_feature (4)..(4): n is 2'-fluoro-2'-deoxycytidine
  misc_feature (5)..(5): n is hexaethylene glycol
  misc_feature (7)..(8): n is 5-(N-benzylcarboxyamide)-2'-deoxyuridine
  misc_feature (11)..(11): n is 2'-O-methyl-adenosine
  misc_feature (16)..(18): n is 5-(N-benzylcarboxyamide)-2'-deoxyuridine
  misc_feature (20)..(20): n is 5-(N-benzylcarboxyamide)-2'-deoxyuridine
  misc_feature (21)..(21): n is 2'-O-methyl-adenosine
  misc_feature (24)..(24): n is 2'-O-methyl-guanosine
nnnnngnnacncgcgnnnanngcn

SEQ ID NO: 197 - DNA, 24 bp, Artificial Sequence
  Synthetic
  misc_feature (1)..(2): n is 5-(N-benzylcarboxyamide)-2'-deoxyuridine
  misc_feature (3)..(3): n is 2'-O-methyl-adenosine
  misc_feature (5)..(5): n is hexaethylene glycol
  misc_feature (7)..(8): n is 5-(N-benzylcarboxyamide)-2'-deoxyuridine
  misc_feature (10)..(10): n is 2'-fluoro-2'-deoxycytidine
  misc_feature (11)..(11): n is 2'-O-methyl-adenosine
  misc_feature (16)..(18): n is 5-(N-benzylcarboxyamide)-2'-deoxyuridine
  misc_feature (20)..(20): n is 5-(N-benzylcarboxyamide)-2'-deoxyuridine
  misc_feature (21)..(21): n is 2'-O-methyl-adenosine
  misc_feature (24)..(24): n is 2'-O-methyl-guanosine
nnncngnnanncgcgnnnanngcn

SEQ ID NO: 198 - DNA, 24 bp, Artificial Sequence
  Synthetic
  misc_feature (1)..(2): n is 5-(N-benzylcarboxyamide)-2'-deoxyuridine
  misc_feature (3)..(3): n is 2'-O-methyl-adenosine
  misc_feature (5)..(5): n is hexaethylene glycol
  misc_feature (7)..(8): n is 5-(N-benzylcarboxyamide)-2'-deoxyuridine
  misc_feature (11)..(11): n is 2'-O-methyl-adenosine
  misc_feature (12)..(12): n is 2'-fluoro-2'-deoxycytidine
  misc_feature (16)..(18): n is 5-(N-benzylcarboxyamide)-2'-deoxyuridine
  misc_feature (20)..(20): n is 5-(N-benzylcarboxyamide)-2'-deoxyuridine
  misc_feature (21)..(21): n is 2'-O-methyl-adenosine
  misc_feature (24)..(24): n is 2'-O-methyl-guanosine
nnncngnnacnngcgnnnanngcn

SEQ ID NO: 199 - DNA, 24 bp, Artificial Sequence
  Synthetic
  misc_feature (1)..(2): n is 5-(N-benzylcarboxyamide)-2'-deoxyuridine
  misc_feature (3)..(3): n is 2'-O-methyl-adenosine
  misc_feature (5)..(5): n is hexaethylene glycol
  misc_feature (7)..(8): n is 5-(N-benzylcarboxyamide)-2'-deoxyuridine
  misc_feature (11)..(11): n is 2'-O-methyl-adenosine
  misc_feature (14)..(14): n is 2'-fluoro-2'-deoxycytidine
  misc_feature (16)..(18): n is 5-(N-benzylcarboxyamide)-2'-deoxyuridine
  misc_feature (20)..(20): n is 5-(N-benzylcarboxyamide)-2'-deoxyuridine
  misc_feature (21)..(21): n is 2'-O-methyl-adenosine
  misc_feature (24)..(24): n is 2'-O-methyl-guanosine
nnncngnnacncgngnnnanngcn

SEQ ID NO: 200 - DNA, 24 bp, Artificial Sequence
  Synthetic
  misc_feature (1)..(2): n is 5-(N-benzylcarboxyamide)-2'-deoxyuridine
  misc_feature (3)..(3): n is 2'-O-methyl-adenosine
  misc_feature (5)..(5): n is hexaethylene glycol
  misc_feature (7)..(8): n is 5-(N-benzylcarboxyamide)-2'-deoxyuridine
  misc_feature (11)..(11): n is 2'-O-methyl-adenosine
  misc_feature (16)..(18): n is 5-(N-benzylcarboxyamide)-2'-deoxyuridine
  misc_feature (20)..(20): n is 5-(N-benzylcarboxyamide)-2'-deoxyuridine
  misc_feature (21)..(21): n is 2'-O-methyl-adenosine
  misc_feature (23)..(23): n is 2'-fluoro-2'-deoxycytidine
  misc_feature (24)..(24): n is 2'-O-methyl-guanosine
nnncngnnacncgcgnnnanngnn

SEQ ID NO: 201 - DNA, 24 bp, Artificial Sequence
  Synthetic
  misc_feature (1)..(2): n is 5-(N-benzylcarboxyamide)-2'-deoxyuridine
  misc_feature (3)..(3): n is 2'-O-methyl-adenosine
  misc_feature (5)..(5): n is hexaethylene glycol
  misc_feature (7)..(8): n is 5-(N-benzylcarboxyamide)-2'-deoxyuridine
  misc_feature (11)..(11): n is 2'-O-methyl-adenosine
  misc_feature (16)..(18): n is 5-(N-benzylcarboxyamide)-2'-deoxyuridine
  misc_feature (19)..(19): n is 2'-O-methyl-adenosine
  misc_feature (20)..(20): n is 5-(N-benzylcarboxyamide)-2'-deoxyuridine
  misc_feature (21)..(21): n is 2'-O-methyl-adenosine
  misc_feature (24)..(24): n is 2'-O-methyl-guanosine
nnncngnnacncgcgnnnnnngcn

SEQ ID NO: 202 - DNA, 24 bp, Artificial Sequence
  Synthetic
  misc_feature (1)..(2): n is 5-(N-benzylcarboxyamide)-2'-deoxyuridine
  misc_feature (3)..(3): n is 2'-O-methyl-adenosine
  misc_feature (5)..(5): n is hexaethylene glycol
  misc_feature (6)..(6): n is 2'-O-methyl-guanosine
  misc_feature (7)..(8): n is 5-(N-benzylcarboxyamide)-2'-deoxyuridine
  misc_feature (11)..(11): n is 2'-O-methyl-adenosine
  misc_feature (16)..(18): n is 5-(N-benzylcarboxyamide)-2'-deoxyuridine
  misc_feature (20)..(20): n is 5-(N-benzylcarboxyamide)-2'-deoxyuridine
  misc_feature (21)..(21): n is 2'-O-methyl-adenosine
  misc_feature (24)..(24): n is 2'-O-methyl-guanosine
nnncnnnnacncgcgnnnanngcn

SEQ ID NO: 203 - DNA, 24 bp, Artificial Sequence
  Synthetic
  misc_feature (1)..(2): n is 5-(N-benzylcarboxyamide)-2'-deoxyuridine
  misc_feature (3)..(3): n is 2'-O-methyl-adenosine
  misc_feature (5)..(5): n is hexaethylene glycol
  misc_feature (7)..(8): n is 5-(N-benzylcarboxyamide)-2'-deoxyuridine
  misc_feature (11)..(11): n is 2'-O-methyl-adenosine
  misc_feature (13)..(13): n is 2'-O-methyl-guanosine
  misc_feature (16)..(18): n is 5-(N-benzylcarboxyamide)-2'-deoxyuridine
  misc_feature (20)..(20): n is 5-(N-benzylcarboxyamide)-2'-deoxyuridine
  misc_feature (21)..(21): n is 2'-O-methyl-adenosine
  misc_feature (24)..(24): n is 2'-O-methyl-guanosine
nnncngnnacncncgnnnanngcn

SEQ ID NO: 204 - DNA, 24 bp, Artificial Sequence
  Synthetic
  misc_feature (1)..(2): n is 5-(N-benzylcarboxyamide)-2'-deoxyuridine
  misc_feature (3)..(3): n is 2'-O-methyl-adenosine
  misc_feature (5)..(5): n is hexaethylene glycol
  misc_feature (7)..(8): n is 5-(N-benzylcarboxyamide)-2'-deoxyuridine
  misc_feature (11)..(11): n is 2'-O-methyl-adenosine
  misc_feature (15)..(15): n is 2'-O-methyl-guanosine
  misc_feature (16)..(18): n is 5-(N-benzylcarboxyamide)-2'-deoxyuridine
  misc_feature (20)..(20): n is 5-(N-benzylcarboxyamide)-2'-deoxyuridine
  misc_feature (21)..(21): n is 2'-O-methyl-adenosine
  misc_feature (24)..(24): n is 2'-O-methyl-guanosine
nnncngnnacncgcnnnnanngcn

SEQ ID NO: 205 - DNA, 24 bp, Artificial Sequence
  Synthetic
  misc_feature (1)..(2): n is 5-(N-benzylcarboxyamide)-2'-deoxyuridine
  misc_feature (3)..(3): n is 2'-O-methyl-adenosine
  misc_feature (5)..(5): n is hexaethylene glycol
  misc_feature (7)..(8): n is 5-(N-benzylcarboxyamide)-2'-deoxyuridine
  misc_feature (11)..(11): n is 2'-O-methyl-adenosine
  misc_feature (16)..(18): n is 5-(N-benzylcarboxyamide)-2'-deoxyuridine
  misc_feature (20)..(20): n is 5-(N-benzylcarboxyamide)-2'-deoxyuridine
  misc_feature (21)..(21): n is 2'-O-methyl-adenosine
  misc_feature (22)..(22): n is 2'-O-methyl-guanosine
  misc_feature (24)..(24): n is 2'-O-methyl-guanosine
nnncngnnacncgcgnnnannncn

SEQ ID NO: 206 - DNA, 24 bp, Artificial Sequence
  Synthetic
  misc_feature (1)..(1): n is 5-[N-(4-hydroxyphenyl-2-ethyl)carboxyamide]-2'-deoxyuridine
  misc_feature (2)..(2): n is 5-(N-benzylcarboxyamide)-2'-deoxyuridine
  misc_feature (3)..(3): n is 2'-O-methyl-adenosine
  misc_feature (5)..(5): n is hexaethylene glycol
  misc_feature (7)..(7): n is 5-[N-(4-fluorobenzyl)carboxyamide]-2'-deoxyuridine
  misc_feature (8)..(8): n is 5-(N-benzylcarboxyamide)-2'-deoxyuridine
  misc_feature (11)..(11): n is 2'-O-methyl-adenosine
  misc_feature (16)..(16): n is 5-[N-(2-naphthylmethyl)carboxyamide]-2'-deoxyuridine
  misc_feature (17)..(18): n is 5-(N-benzylcarboxyamide)-2'-deoxyuridine
  misc_feature (20)..(20): n is 5-(N-benzylcarboxyamide)-2'-deoxyuridine
  misc_feature (21)..(21): n is 2'-O-methyl-adenosine
  misc_feature (24)..(24): n is 2'-O-methyl-guanosine
nnncngnnacncgcgnnnanngcn

SEQ ID NO: 207 - DNA, 24 bp, Artificial Sequence
  Synthetic
  misc_feature (1)..(2): n is 5-(N-benzylcarboxyamide)-2'-deoxyuridine
  misc_feature (3)..(3): n is 2'-O-methyl-adenosine
  misc_feature (5)..(5): n is hexaethylene glycol
  misc_feature (7)..(7): n is 5-(N-benzylcarboxyamide)-2'-deoxyuridine
  misc_feature (8)..(8): n is 5-[N-isobutyl-carboxyamide]-2'-deoxyuridine
  misc_feature (11)..(11): n is 2'-O-methyl-adenosine
  misc_feature (16)..(16): n is 5-(N-benzylcarboxyamide)-2'-deoxyuridine
  misc_feature (17)..(17): n is 5-[N-(phenyl-2-ethyl)-carboxyamide]-2'-deoxyuridine
  misc_feature (18)..(18): n is 5-[N-(2-thiophene-methyl)carboxyamide]-2'-deoxyuridine
  misc_feature (20)..(20): n is 5-(N-benzylcarboxyamide)-2'-deoxyuridine
  misc_feature (21)..(21): n is 2'-O-methyl-adenosine
  misc_feature (24)..(24): n is 2'-O-methyl-guanosine
nnncngnnacncgcgnnnanngcn

SEQ ID NO: 208 - DNA, 24 bp, Artificial Sequence
  Synthetic
  misc_feature (1)..(2): n is 5-(N-benzylcarboxyamide)-2'-deoxyuridine
  misc_feature (3)..(3): n is 2'-O-methyl-adenosine
  misc_feature (5)..(5): n is hexaethylene glycol
  misc_feature (7)..(7): n is 5-[N-(2-naphthylmethyl)carboxyamide]-2'-deoxyuridine
  misc_feature (8)..(8): n is 5-[N-isobutyl-carboxyamide]-2'-deoxyuridine
  misc_feature (11)..(11): n is 2'-O-methyl-adenosine
  misc_feature (16)..(18): n is 5-(N-benzylcarboxyamide)-2'-deoxyuridine
  misc_feature (20)..(20): n is 5-(N-benzylcarboxyamide)-2'-deoxyuridine
  misc_feature (21)..(21): n is 2'-O-methyl-adenosine
  misc_feature (24)..(24): n is 2'-O-methyl-guanosine
nnncngnnacncgcgnnnanngcn

SEQ ID NO: 209 - DNA, 24 bp, Artificial Sequence
  Synthetic
  misc_feature (1)..(2): n is 5-(N-benzylcarboxyamide)-2'-deoxyuridine
  misc_feature (3)..(3): n is 2'-O-methyl-adenosine
  misc_feature (5)..(5): n is hexaethylene glycol
  misc_feature (7)..(7): n is 5-[N-(1-naphthyl-2-ethyl)carboxyamide]-2'-deoxyuridine
  misc_feature (8)..(8): n is 5-[N-isobutyl-carboxyamide]-2'-deoxyuridine
  misc_feature (11)..(11): n is 2'-O-methyl-adenosine
  misc_feature (16)..(18): n is 5-(N-benzylcarboxyamide)-2'-deoxyuridine
  misc_feature (20)..(20): n is 5-(N-benzylcarboxyamide)-2'-deoxyuridine
  misc_feature (21)..(21): n is 2'-O-methyl-adenosine
  misc_feature (24)..(24): n is 2'-O-methyl-guanosine
nnncngnnacncgcgnnnanngcn

SEQ ID NO: 210 - DNA, 24 bp, Artificial Sequence
  Synthetic
  misc_feature (1)..(2): n is 5-(N-benzylcarboxyamide)-2'-deoxyuridine
  misc_feature (3)..(3): n is 2'-O-methyl-adenosine
  misc_feature (5)..(5): n is hexaethylene glycol
  misc_feature (7)..(8): n is 5-[N-isobutyl-carboxyamide]-2'-deoxyuridine
  misc_feature (11)..(11): n is 2'-O-methyl-adenosine
  misc_feature (16)..(18): n is 5-(N-benzylcarboxyamide)-2'-deoxyuridine
  misc_feature (20)..(20): n is 5-(N-benzylcarboxyamide)-2'-deoxyuridine
  misc_feature (21)..(21): n is 2'-O-methyl-adenosine
  misc_feature (24)..(24): n is 2'-O-methyl-guanosine
nnncngnnacncgcgnnnanngcn

SEQ ID NO: 211 - DNA, 24 bp, Artificial Sequence
  Synthetic
  misc_feature (1)..(2): n is 5-(N-benzylcarboxyamide)-2'-deoxyuridine
  misc_feature (3)..(3): n is 2'-O-methyl-adenosine
  misc_feature (5)..(5): n is hexaethylene glycol
  misc_feature (7)..(8): n is 5-(N-benzylcarboxyamide)-2'-deoxyuridine
  misc_feature (11)..(11): n is 2'-O-methyl-adenosine
  misc_feature (16)..(16): n is 5-(N-benzylcarboxyamide)-2'-deoxyuridine
  misc_feature (17)..(17): n is 5-[N-(phenyl-2-ethyl)-carboxyamide]-2'-deoxyuridine
  misc_feature (18)..(18): n is 5-[N-(2-thiophene-methyl)carboxyamide]-2'-deoxyuridine
  misc_feature (20)..(20): n is 5-(N-benzylcarboxyamide)-2'-deoxyuridine
  misc_feature (21)..(21): n is 2'-O-methyl-adenosine
  misc_feature (24)..(24): n is 2'-O-methyl-guanosine
nnncngnnacncgcgnnnanngcn

SEQ ID NO: 212 - DNA, 24 bp, Artificial Sequence
  Synthetic
  misc_feature (1)..(2): n is 5-(N-benzylcarboxyamide)-2'-deoxyuridine
  misc_feature (3)..(3): n is 2'-O-methyl-adenosine
  misc_feature (5)..(5): n is hexaethylene glycol
  misc_feature (7)..(8): n is 5-(N-benzylcarboxyamide)-2'-deoxyuridine
  misc_feature (11)..(11): n is 2'-O-methyl-adenosine
  misc_feature (16)..(16): n is 5-(N-benzylcarboxyamide)-2'-deoxyuridine
  misc_feature (17)..(18): n is 5-[N-(phenyl-2-ethyl)-carboxyamide]-2'-deoxyuridine
  misc_feature (20)..(20): n is 5-(N-benzylcarboxyamide)-2'-deoxyuridine
  misc_feature (21)..(21): n is 2'-O-methyl-adenosine
  misc_feature (24)..(24): n is 2'-O-methyl-guanosine
nnncngnnacncgcgnnnanngcn

SEQ ID NO: 213 - DNA, 24 bp, Artificial Sequence
  Synthetic
  misc_feature (1)..(2): n is 5-(N-benzylcarboxyamide)-2'-deoxyuridine
  misc_feature (3)..(3): n is 2'-O-methyl-adenosine
  misc_feature (5)..(5): n is hexaethylene glycol
  misc_feature (7)..(8): n is 5-(N-benzylcarboxyamide)-2'-deoxyuridine
  misc_feature (11)..(11): n is 2'-O-methyl-adenosine
  misc_feature (16)..(16): n is 5-(N-benzylcarboxyamide)-2'-deoxyuridine
  misc_feature (17)..(18): n is 5-[N-(2-thiophene-methyl)carboxyamide]-2'-deoxyuridine
  misc_feature (20)..(20): n is 5-(N-benzylcarboxyamide)-2'-deoxyuridine
  misc_feature (21)..(21): n is 2'-O-methyl-adenosine
  misc_feature (24)..(24): n is 2'-O-methyl-guanosine
nnncngnnacncgcgnnnanngcn

SEQ ID NO: 214 - DNA, 24 bp, Artificial Sequence
  Synthetic
  misc_feature (1)..(2): n is 5-(N-benzylcarboxyamide)-2'-deoxyuridine
  misc_feature (3)..(3): n is 2'-O-methyl-adenosine
  misc_feature (5)..(5): n is hexaethylene glycol
  misc_feature (7)..(8): n is 5-(N-benzylcarboxyamide)-2'-deoxyuridine
  misc_feature (11)..(11): n is 2'-O-methyl-adenosine
  misc_feature (16)..(16): n is 5-[N-(2-naphthylmethyl)carboxyamide]-2'-deoxyuridine
  misc_feature (17)..(17): n is 5-[N-(phenyl-2-ethyl)-carboxyamide]-2'-deoxyuridine
  misc_feature (18)..(18): n is 5-[N-(2-thiophene-methyl)carboxyamide]-2'-deoxyuridine
  misc_feature (20)..(20): n is 5-(N-benzylcarboxyamide)-2'-deoxyuridine
  misc_feature (21)..(21): n is 2'-O-methyl-adenosine
  misc_feature (24)..(24): n is 2'-O-methyl-guanosine
nnncngnnacncgcgnnnanngcn

SEQ ID NO: 215 - DNA, 24 bp, Artificial Sequence
  Synthetic
  misc_feature (1)..(2): n is 5-(N-benzylcarboxyamide)-2'-deoxyuridine
  misc_feature (3)..(3): n is 2'-O-methyl-adenosine
  misc_feature (5)..(5): n is hexaethylene glycol
  misc_feature (7)..(8): n is 5-(N-benzylcarboxyamide)-2'-deoxyuridine
  misc_feature (11)..(11): n is 2'-O-methyl-adenosine
  misc_feature (16)..(16): n is 5-[N-(2-thiophene-methyl)carboxyamide]-2'-deoxyuridine
  misc_feature (17)..(17): n is 5-[N-(phenyl-2-ethyl)-carboxyamide]-2'-deoxyuridine
  misc_feature (18)..(18): n is 5-[N-(2-thiophene-methyl)carboxyamide]-2'-deoxyuridine
  misc_feature (20)..(20): n is 5-(N-benzylcarboxyamide)-2'-deoxyuridine
  misc_feature (21)..(21): n is 2'-O-methyl-adenosine
  misc_feature (24)..(24): n is 2'-O-methyl-guanosine
nnncngnnacncgcgnnnanngcn

SEQ ID NO: 216 - DNA, 24 bp, Artificial Sequence
  Synthetic
  misc_feature (1)..(2): n is 5-(N-benzylcarboxyamide)-2'-deoxyuridine
  misc_feature (3)..(3): n is 2'-O-methyl-adenosine
  misc_feature (5)..(5): n is hexaethylene glycol
  misc_feature (7)..(8): n is 5-(N-benzylcarboxyamide)-2'-deoxyuridine
  misc_feature (11)..(11): n is 2'-O-methyl-adenosine
  misc_feature (16)..(16): n is 5-[N-isobutyl-carboxyamide]-2'-deoxyuridine
  misc_feature (17)..(17): n is 5-[N-(phenyl-2-ethyl)-carboxyamide]-2'-deoxyuridine
  misc_feature (18)..(18): n is 5-[N-(2-thiophene-methyl)carboxyamide]-2'-deoxyuridine
  misc_feature (20)..(20): n is 5-(N-benzylcarboxyamide)-2'-deoxyuridine
  misc_feature (21)..(21): n is 2'-O-methyl-adenosine
  misc_feature (24)..(24): n is 2'-O-methyl-guanosine
nnncngnnacncgcgnnnanngcn

SEQ ID NO: 217 - DNA, 24 bp, Artificial Sequence
  Synthetic
  misc_feature (1)..(2): n is 5-(N-benzylcarboxyamide)-2'-deoxyuridine
  misc_feature (3)..(3): n is 2'-O-methyl-adenosine
  misc_feature (5)..(5): n is hexaethylene glycol
  misc_feature (7)..(7): n is 5-(N-benzylcarboxyamide)-2'-deoxyuridine
  misc_feature (8)..(8): n is 5-[N-isobutyl-carboxyamide]-2'-deoxyuridine
  misc_feature (11)..(11): n is 2'-O-methyl-adenosine
  misc_feature (16)..(16): n is 5-[N-(2-thiophene-methyl)carboxyamide]-2'-deoxyuridine
  misc_feature (17)..(17): n is 5-[N-(phenyl-2-ethyl)-carboxyamide]-2'-deoxyuridine
  misc_feature (18)..(18): n is 5-[N-(2-thiophene-methyl)carboxyamide]-2'-deoxyuridine
  misc_feature (20)..(20): n is 5-(N-benzylcarboxyamide)-2'-deoxyuridine
  misc_feature (21)..(21): n is 2'-O-methyl-adenosine
  misc_feature (24)..(24): n is 2'-O-methyl-guanosine
nnncngnnacncgcgnnnanngcn

SEQ ID NO: 218 - DNA, 24 bp, Artificial Sequence
  Synthetic
  misc_feature (1)..(1): n is 5-(N-benzylcarboxyamide)-2'-deoxyuridine
  misc_feature (2)..(2): n is 5-[N-isobutyl-carboxyamide]-2'-deoxyuridine
  misc_feature (3)..(3): n is 2'-O-methyl-adenosine
  misc_feature (5)..(5): n is hexaethylene glycol
  misc_feature (7)..(8): n is 5-[N-isobutyl-carboxyamide]-2'-deoxyuridine
  misc_feature (11)..(11): n is 2'-O-methyl-adenosine
  misc_feature (16)..(16): n is 5-[N-isobutyl-carboxyamide]-2'-deoxyuridine
  misc_feature (17)..(18): n is 5-(N-benzylcarboxyamide)-2'-deoxyuridine
  misc_feature (20)..(20): n is 5-(N-benzylcarboxyamide)-2'-deoxyuridine
  misc_feature (21)..(21): n is 2'-O-methyl-adenosine
  misc_feature (24)..(24): n is 2'-O-methyl-guanosine
nnncngnnacncgcgnnnanngcn

SEQ ID NO: 219 - DNA, 24 bp, Artificial Sequence
  Synthetic
  misc_feature (1)..(2): n is 5-[N-(2-naphthylmethyl)carboxyamide]-2'-deoxyuridine
  misc_feature (3)..(3): n is 2'-O-methyl-adenosine
  misc_feature (5)..(5): n is hexaethylene glycol
  misc_feature (7)..(7): n is 5-[N-(2-naphthylmethyl)carboxyamide]-2'-deoxyuridine
  misc_feature (8)..(8): n is 5-(N-benzylcarboxyamide)-2'-deoxyuridine
  misc_feature (11)..(11): n is 2'-O-methyl-adenosine
  misc_feature (16)..(16): n is 5-[N-(2-naphthylmethyl)carboxyamide]-2'-deoxyuridine
  misc_feature (17)..(18): n is 5-(N-benzylcarboxyamide)-2'-deoxyuridine
  misc_feature (20)..(20): n is 5-(N-benzylcarboxyamide)-2'-deoxyuridine
  misc_feature (21)..(21): n is 2'-O-methyl-adenosine
  misc_feature (24)..(24): n is 2'-O-methyl-guanosine
nnncngnnacncgcgnnnanngcn

SEQ ID NO: 220 - DNA, 24 bp, Artificial Sequence
  Synthetic
  misc_feature (1)..(1): n is 5-[N-(1-naphthyl-2-ethyl)carboxyamide]-2'-deoxyuridine
  misc_feature (2)..(2): n is 5-(N-benzylcarboxyamide)-2'-deoxyuridine
  misc_feature (3)..(3): n is 2'-O-methyl-adenosine
  misc_feature (5)..(5): n is hexaethylene glycol
  misc_feature (7)..(7): n is 5-[N-(1-naphthyl-2-ethyl)carboxyamide]-2'-deoxyuridine
  misc_feature (8)..(8): n is 5-(N-benzylcarboxyamide)-2'-deoxyuridine
  misc_feature (11)..(11): n is 2'-O-methyl-adenosine
  misc_feature (16)..(18): n is 5-(N-benzylcarboxyamide)-2'-deoxyuridine
  misc_feature (20)..(20): n is 5-[N-(1-naphthyl-2-ethyl)carboxyamide]-2'-deoxyuridine
  misc_feature (21)..(21): n is 2'-O-methyl-adenosine
  misc_feature (24)..(24): n is 2'-O-methyl-guanosine
nnncngnnacncgcgnnnanngcn

SEQ ID NO: 221 - DNA, 24 bp, Artificial Sequence
  Synthetic
  misc_feature (1)..(1): n is 5-[N-(2-thiophene-methyl)carboxyamide]-2'-deoxyuridine
  misc_feature (2)..(2): n is 5-(N-benzylcarboxyamide)-2'-deoxyuridine
  misc_feature (3)..(3): n is 2'-O-methyl-adenosine
  misc_feature (5)..(5): n is hexaethylene glycol
  misc_feature (7)..(8): n is 5-(N-benzylcarboxyamide)-2'-deoxyuridine
  misc_feature (11)..(11): n is 2'-O-methyl-adenosine
  misc_feature (16)..(16): n is 5-[N-(2-thiophene-methyl)carboxyamide]-2'-deoxyuridine
  misc_feature (17)..(17): n is 5-(N-benzylcarboxyamide)-2'-deoxyuridine
  misc_feature (18)..(18): n is 5-[N-(2-thiophene-methyl)carboxyamide]-2'-deoxyuridine
  misc_feature (20)..(20): n is 5-(N-benzylcarboxyamide)-2'-deoxyuridine
  misc_feature (21)..(21): n is 2'-O-methyl-adenosine
  misc_feature (24)..(24): n is 2'-O-methyl-guanosine
nnncngnnacncgcgnnnanngcn

SEQ ID NO: 222 - DNA, 24 bp, Artificial Sequence
  Synthetic
  misc_feature (1)..(2): n is 5-(N-benzylcarboxyamide)-2'-deoxyuridine
  misc_feature (3)..(3): n is 2'-O-methyl-adenosine
  misc_feature (5)..(5): n is hexaethylene glycol
  misc_feature (7)..(8): n is 5-(N-benzylcarboxyamide)-2'-deoxyuridine
  misc_feature (11)..(11): n is 2'-O-methyl-adenosine
  misc_feature (12)..(12): n is 2'-O-methyl-cytidine
  misc_feature (16)..(18): n is 5-(N-benzylcarboxyamide)-2'-deoxyuridine
  misc_feature (19)..(19): n is 2'-O-methyl-adenosine
  misc_feature (20)..(20): n is 5-(N-benzylcarboxyamide)-2'-deoxyuridine
  misc_feature (21)..(21): n is 2'-O-methyl-adenosine
  misc_feature (22)..(22): n is 2'-O-methyl-guanosine
  misc_feature (24)..(24): n is 2'-O-methyl-guanosine
nnncngnnacnngcgnnnnnnncn

SEQ ID NO: 223 - DNA, 24 bp, Artificial Sequence
  Synthetic
  misc_feature (1)..(2): n is 5-(N-benzylcarboxyamide)-2'-deoxyuridine
  misc_feature (3)..(3): n is 2'-O-methyl-adenosine
  misc_feature (5)..(5): n is hexaethylene glycol
  misc_feature (7)..(8): n is 5-(N-benzylcarboxyamide)-2'-deoxyuridine
  misc_feature (11)..(11): n is 2'-O-methyl-adenosine
  misc_feature (16)..(18): n is 5-(N-benzylcarboxyamide)-2'-deoxyuridine
  misc_feature (19)..(19): n is 2'-O-methyl-adenosine
  misc_feature (20)..(20): n is 5-(N-benzylcarboxyamide)-2'-deoxyuridine
  misc_feature (21)..(21): n is 2'-O-methyl-adenosine
  misc_feature (22)..(22): n is 2'-O-methyl-guanosine
  misc_feature (24)..(24): n is 2'-O-methyl-guanosine
nnncngnnacncgcgnnnnnnncn

SEQ ID NO: 224 - DNA, 24 bp, Artificial Sequence
  Synthetic
  misc_feature (1)..(2): n is 5-(N-benzylcarboxyamide)-2'-deoxyuridine
  misc_feature (3)..(3): n is 2'-O-methyl-adenosine
  misc_feature (5)..(5): n is hexaethylene glycol
  misc_feature (7)..(8): n is 5-(N-benzylcarboxyamide)-2'-deoxyuridine
  misc_feature (11)..(11): n is 2'-O-methyl-adenosine
  misc_feature (12)..(12): n is 2'-O-methyl-cytidine
  misc_feature (16)..(18): n is 5-(N-benzylcarboxyamide)-2'-deoxyuridine
  misc_feature (19)..(19): n is 2'-O-methyl-adenosine
  misc_feature (20)..(20): n is 5-(N-benzylcarboxyamide)-2'-deoxyuridine
  misc_feature (21)..(21): n is 2'-O-methyl-adenosine
  misc_feature (24)..(24): n is 2'-O-methyl-guanosine
nnncngnnacnngcgnnnnnngcn

SEQ ID NO: 225 - DNA, 24 bp, Artificial Sequence
  Synthetic
  misc_feature (1)..(2): n is 5-(N-benzylcarboxyamide)-2'-deoxyuridine
  misc_feature (3)..(3): n is 2'-O-methyl-adenosine
  misc_feature (5)..(5): n is hexaethylene glycol
  misc_feature (7)..(8): n is 5-(N-benzylcarboxyamide)-2'-deoxyuridine
  misc_feature (11)..(11): n is 2'-O-methyl-adenosine
  misc_feature (12)..(12): n is 2'-O-methyl-cytidine
  misc_feature (16)..(18): n is 5-(N-benzylcarboxyamide)-2'-deoxyuridine
  misc_feature (20)..(20): n is 5-(N-benzylcarboxyamide)-2'-deoxyuridine
  misc_feature (21)..(21): n is 2'-O-methyl-adenosine
  misc_feature (22)..(22): n is 2'-O-methyl-guanosine
  misc_feature (24)..(24): n is 2'-O-methyl-guanosine
nnncngnnacnngcgnnnannncn

SEQ ID NO: 226 - DNA, 24 bp, Artificial Sequence
  Synthetic
  misc_feature (1)..(2): n is 5-(N-benzylcarboxyamide)-2'-deoxyuridine
  misc_feature (3)..(3): n is 2'-O-methyl-adenosine
  misc_feature (5)..(5): n is hexaethylene glycol
  misc_feature (7)..(7): n is 5-(N-benzylcarboxyamide)-2'-deoxyuridine
  misc_feature (8)..(8): n is 5-[N-isobutyl-carboxyamide]-2'-deoxyuridine
  misc_feature (11)..(11): n is 2'-O-methyl-adenosine
  misc_feature (16)..(16): n is 5-[N-(2-naphthylmethyl)carboxyamide]-2'-deoxyuridine
  misc_feature (17)..(17): n is 5-[N-(phenyl-2-ethyl)-carboxyamide]-2'-deoxyuridine
  misc_feature (18)..(18): n is 5-[N-(2-thiophene-methyl)carboxyamide]-2'-deoxyuridine
  misc_feature (20)..(20): n is 5-(N-benzylcarboxyamide)-2'-deoxyuridine
  misc_feature (21)..(21): n is 2'-O-methyl-adenosine
  misc_feature (24)..(24): n is 2'-O-methyl-guanosine
nnncngnnacncgcgnnnanngcn

SEQ ID NO: 227 - DNA, 24 bp, Artificial Sequence
  Synthetic
  misc_feature (1)..(2): n is 5-(N-benzylcarboxyamide)-2'-deoxyuridine
  misc_feature (3)..(3): n is 2'-O-methyl-adenosine
  misc_feature (5)..(5): n is hexaethylene glycol
  misc_feature (7)..(7): n is 5-(N-benzylcarboxyamide)-2'-deoxyuridine
  misc_feature (8)..(8): n is 5-[N-isobutyl-carboxyamide]-2'-deoxyuridine
  misc_feature (11)..(11): n is 2'-O-methyl-adenosine
  misc_feature (12)..(12): n is 2'-O-methyl-cytidine
  misc_feature (16)..(16): n is 5-(N-benzylcarboxyamide)-2'-deoxyuridine
  misc_feature (17)..(17): n is 5-[N-(phenyl-2-ethyl)-carboxyamide]-2'-deoxyuridine
  misc_feature (18)..(18): n is 5-[N-(2-thiophene-methyl)carboxyamide]-2'-deoxyuridine
  misc_feature (20)..(20): n is 5-(N-benzylcarboxyamide)-2'-deoxyuridine
  misc_feature (21)..(21): n is 2'-O-methyl-adenosine
  misc_feature (24)..(24): n is 2'-O-methyl-guanosine
nnncngnnacnngcgnnnanngcn

SEQ ID NO: 228 - DNA, 24 bp, Artificial Sequence
  Synthetic
  misc_feature (1)..(2): n is 5-(N-benzylcarboxyamide)-2'-deoxyuridine
  misc_feature (3)..(3): n is 2'-O-methyl-adenosine
  misc_feature (5)..(5): n is hexaethylene glycol
  misc_feature (7)..(7): n is 5-(N-benzylcarboxyamide)-2'-deoxyuridine
  misc_feature (8)..(8): n is 5-[N-isobutyl-carboxyamide]-2'-deoxyuridine
  misc_feature (11)..(11): n is 2'-O-methyl-adenosine
  misc_feature (16)..(16): n is 5-(N-benzylcarboxyamide)-2'-deoxyuridine
  misc_feature (17)..(17): n is 5-[N-(phenyl-2-ethyl)-carboxyamide]-2'-deoxyuridine
  misc_feature (18)..(18): n is 5-[N-(2-thiophene-methyl)carboxyamide]-2'-deoxyuridine
  misc_feature (19)..(19): n is 2'-O-methyl-adenosine
  misc_feature (20)..(20): n is 5-(N-benzylcarboxyamide)-2'-deoxyuridine
  misc_feature (21)..(21): n is 2'-O-methyl-adenosine
  misc_feature (24)..(24): n is 2'-O-methyl-guanosine
nnncngnnacncgcgnnnnnngcn

SEQ ID NO: 229 - DNA, 24 bp, Artificial Sequence
  Synthetic
  misc_feature (1)..(2): n is 5-(N-benzylcarboxyamide)-2'-deoxyuridine
  misc_feature (3)..(3): n is 2'-O-methyl-adenosine
  misc_feature (5)..(5): n is hexaethylene glycol
  misc_feature (7)..(7): n is 5-(N-benzylcarboxyamide)-2'-deoxyuridine
  misc_feature (8)..(8): n is 5-[N-isobutyl-carboxyamide]-2'-deoxyuridine
  misc_feature (11)..(11): n is 2'-O-methyl-adenosine
  misc_feature (16)..(16): n is 5-(N-benzylcarboxyamide)-2'-deoxyuridine
  misc_feature (17)..(17): n is 5-[N-(phenyl-2-ethyl)-carboxyamide]-2'-deoxyuridine
  misc_feature (18)..(18): n is 5-[N-(2-thiophene-methyl)carboxyamide]-2'-deoxyuridine
  misc_feature (20)..(20): n is 5-(N-benzylcarboxyamide)-2'-deoxyuridine
  misc_feature (21)..(21): n is 2'-O-methyl-adenosine
  misc_feature (22)..(22): n is 2'-O-methyl-guanosine
  misc_feature (24)..(24): n is 2'-O-methyl-guanosine
nnncngnnacncgcgnnnannncn

SEQ ID NO: 230 - DNA, 24 bp, Artificial Sequence
  Synthetic
  misc_feature (1)..(2): n is 5-(N-benzylcarboxyamide)-2'-deoxyuridine
  misc_feature (3)..(3): n is 2'-O-methyl-adenosine
  misc_feature (5)..(5): n is hexaethylene glycol
  misc_feature (7)..(7): n is 5-(N-benzylcarboxyamide)-2'-deoxyuridine
  misc_feature (8)..(8): n is 5-[N-isobutyl-carboxyamide]-2'-deoxyuridine
  misc_feature (11)..(11): n is 2'-O-methyl-adenosine
  misc_feature (12)..(12): n is 2'-O-methyl-cytidine
  misc_feature (16)..(16): n is 5-(N-benzylcarboxyamide)-2'-deoxyuridine
  misc_feature (17)..(17): n is 5-[N-(phenyl-2-ethyl)-carboxyamide]-2'-deoxyuridine
  misc_feature (18)..(18): n is 5-[N-(2-thiophene-methyl)carboxyamide]-2'-deoxyuridine
  misc_feature (19)..(19): n is 2'-O-methyl-adenosine
  misc_feature (20)..(20): n is 5-(N-benzylcarboxyamide)-2'-deoxyuridine
  misc_feature (21)..(21): n is 2'-O-methyl-adenosine
  misc_feature (24)..(24): n is 2'-O-methyl-guanosine
nnncngnnacnngcgnnnnnngcn

SEQ ID NO: 231 - DNA, 24 bp, Artificial Sequence
  Synthetic
  misc_feature (1)..(2): n is 5-(N-benzylcarboxyamide)-2'-deoxyuridine
  misc_feature (3)..(3): n is 2'-O-methyl-adenosine
  misc_feature (5)..(5): n is hexaethylene glycol
  misc_feature (7)..(7): n is 5-(N-benzylcarboxyamide)-2'-deoxyuridine
  misc_feature (8)..(8): n is 5-[N-isobutyl-carboxyamide]-2'-deoxyuridine
  misc_feature (11)..(11): n is 2'-O-methyl-adenosine
  misc_feature (12)..(12): n is 2'-O-methyl-cytidine
  misc_feature (16)..(16): n is 5-(N-benzylcarboxyamide)-2'-deoxyuridine
  misc_feature (17)..(17): n is 5-[N-(phenyl-2-ethyl)-carboxyamide]-2'-deoxyuridine
  misc_feature (18)..(18): n is 5-[N-(2-thiophene-methyl)carboxyamide]-2'-deoxyuridine
  misc_feature (19)..(19): n is 2'-O-methyl-adenosine
  misc_feature (20)..(20): n is 5-(N-benzylcarboxyamide)-2'-deoxyuridine
  misc_feature (21)..(21): n is 2'-O-methyl-adenosine
  misc_feature (22)..(22): n is 2'-O-methyl-guanosine
  misc_feature (24)..(24): n is 2'-O-methyl-guanosine
nnncngnnacnngcgnnnnnnncn

SEQ ID NO: 232 - DNA, 24 bp, Artificial Sequence
  Synthetic
  misc_feature (1)..(2): n is 5-(N-benzylcarboxyamide)-2'-deoxyuridine
  misc_feature (3)..(3): n is 2'-O-methyl-adenosine
  misc_feature (5)..(5): n is hexaethylene glycol
  misc_feature (7)..(8): n is 5-(N-benzylcarboxyamide)-2'-deoxyuridine
  misc_feature (11)..(11): n is 2'-O-methyl-adenosine
  misc_feature (12)..(12): n is 2'-fluoro-2'-deoxycytidine
  misc_feature (16)..(18): n is 5-(N-benzylcarboxyamide)-2'-deoxyuridine
  misc_feature (19)..(19): n is 2'-O-methyl-adenosine
  misc_feature (20)..(20): n is 5-(N-benzylcarboxyamide)-2'-deoxyuridine
  misc_feature (21)..(21): n is 2'-O-methyl-adenosine
  misc_feature (24)..(24): n is 2'-O-methyl-guanosine
nnncngnnacnngcgnnnnnngcn

SEQ ID NO: 233 - DNA, 24 bp, Artificial Sequence
  Synthetic
  misc_feature (1)..(2): n is 5-(N-benzylcarboxyamide)-2'-deoxyuridine
  misc_feature (3)..(3): n is 2'-O-methyl-adenosine
  misc_feature (5)..(5): n is hexaethylene glycol
  misc_feature (7)..(8): n is 5-(N-benzylcarboxyamide)-2'-deoxyuridine
  misc_feature (10)..(10): n is 2'-O-methyl-cytidine
  misc_feature (11)..(11): n is 2'-O-methyl-adenosine
  misc_feature (12)..(12): n is 2'-O-methyl-cytidine
  misc_feature (16)..(18): n is 5-(N-benzylcarboxyamide)-2'-deoxyuridine
  misc_feature (19)..(19): n is 2'-O-methyl-adenosine
  misc_feature (20)..(20): n is 5-(N-benzylcarboxyamide)-2'-deoxyuridine
  misc_feature (21)..(21): n is 2'-O-methyl-adenosine
  misc_feature (23)..(23): n is 2'-O-methyl-cytidine
  misc_feature (24)..(24): n is 2'-O-methyl-guanosine
nnncngnnannngcgnnnnnngnn

SEQ ID NO: 234 - DNA, 24 bp, Artificial Sequence
  Synthetic
  misc_feature (1)..(2): n is 5-(N-benzylcarboxyamide)-2'-deoxyuridine
  misc_feature (3)..(3): n is 2'-O-methyl-adenosine
  misc_feature (5)..(5): n is hexaethylene glycol
  misc_feature (7)..(8): n is 5-(N-benzylcarboxyamide)-2'-deoxyuridine
  misc_feature (10)..(10): n is 2'-O-methyl-cytidine
  misc_feature (11)..(11): n is 2'-O-methyl-adenosine
  misc_feature (12)..(12): n is 2'-O-methyl-cytidine
  misc_feature (16)..(18): n is 5-(N-benzylcarboxyamide)-2'-deoxyuridine
  misc_feature (19)..(19): n is 2'-O-methyl-adenosine
  misc_feature (20)..(20): n is 5-(N-benzylcarboxyamide)-2'-deoxyuridine
  misc_feature (21)..(21): n is 2'-O-methyl-adenosine
  misc_feature (22)..(22): n is 2'-O-methyl-guanosine
  misc_feature (23)..(23): n is 2'-O-methyl-cytidine
  misc_feature (24)..(24): n is 2'-O-methyl-guanosine
nnncngnnannngcgnnnnnnnnn

SEQ ID NO: 235 - DNA, 24 bp, Artificial Sequence
  Synthetic
  misc_feature (1)..(2): n is 5-(N-benzylcarboxyamide)-2'-deoxyuridine
  misc_feature (3)..(3): n is 2'-O-methyl-adenosine
  misc_feature (5)..(5): n is hexaethylene glycol
  misc_feature (7)..(8): n is 5-(N-benzylcarboxyamide)-2'-deoxyuridine
  misc_feature (11)..(12): n is 1,3-propane diol
  misc_feature (16)..(18): n is 5-(N-benzylcarboxyamide)-2'-deoxyuridine
  misc_feature (19)..(19): n is 2'-O-methyl-adenosine
  misc_feature (20)..(20): n is 5-(N-benzylcarboxyamide)-2'-deoxyuridine
  misc_feature (21)..(21): n is 2'-O-methyl-adenosine
  misc_feature (24)..(24): n is 2'-O-methyl-guanosine
nnncngnnacnngcgnnnnnngcn

SEQ ID NO: 236 - DNA, 23 bp, Artificial Sequence
  Synthetic
  misc_feature (1)..(2): n is 5-(N-benzylcarboxyamide)-2'-deoxyuridine
  misc_feature (3)..(3): n is 2'-O-methyl-adenosine
  misc_feature (5)..(5): n is hexaethylene glycol
  misc_feature (7)..(8): n is 5-(N-benzylcarboxyamide)-2'-deoxyuridine
  misc_feature (11)..(11): n is 1,3-propane diol
  misc_feature (15)..(17): n is 5-(N-benzylcarboxyamide)-2'-deoxyuridine
  misc_feature (18)..(18): n is 2'-O-methyl-adenosine
  misc_feature (19)..(19): n is 5-(N-benzylcarboxyamide)-2'-deoxyuridine
  misc_feature (20)..(20): n is 2'-O-methyl-adenosine
  misc_feature (23)..(23): n is 2'-O-methyl-guanosine
nnncngnnacngcgnnnnnngcn

SEQ ID NO: 237 - DNA, 24 bp, Artificial Sequence
  Synthetic
  misc_feature (1)..(2): n is 5-(N-benzylcarboxyamide)-2'-deoxyuridine
  misc_feature (3)..(3): n is 2'-O-methyl-adenosine
  misc_feature (5)..(5): n is hexaethylene glycol
  misc_feature (7)..(8): n is 5-(N-benzylcarboxyamide)-2'-deoxyuridine
  misc_feature (11)..(11): n is 1,3-propane diol
  misc_feature (12)..(12): n is 2'-O-methyl-cytidine
  misc_feature (16)..(18): n is 5-(N-benzylcarboxyamide)-2'-deoxyuridine
  misc_feature (19)..(19): n is 2'-O-methyl-adenosine
  misc_feature (20)..(20): n is 5-(N-benzylcarboxyamide)-2'-deoxyuridine
  misc_feature (21)..(21): n is 2'-O-methyl-adenosine
  misc_feature (24)..(24): n is 2'-O-methyl-guanosine
nnncngnnacnngcgnnnnnngcn

SEQ ID NO: 238 - DNA, 24 bp, Artificial Sequence
  Synthetic
  misc_feature (1)..(2): n is 5-(N-benzylcarboxyamide)-2'-deoxyuridine
  misc_feature (3)..(3): n is 2'-O-methyl-adenosine
  misc_feature (5)..(5): n is hexaethylene glycol
  misc_feature (7)..(8): n is 5-(N-benzylcarboxyamide)-2'-deoxyuridine
  misc_feature (11)..(11): n is 2'-O-methyl-adenosine
  misc_feature (12)..(12): n is 1,3-propane diol
  misc_feature (16)..(18): n is 5-(N-benzylcarboxyamide)-2'-deoxyuridine
  misc_feature (19)..(19): n is 2'-O-methyl-adenosine
  misc_feature (20)..(20): n is 5-(N-benzylcarboxyamide)-2'-deoxyuridine
  misc_feature (21)..(21): n is 2'-O-methyl-adenosine
  misc_feature (24)..(24): n is 2'-O-methyl-guanosine
nnncngnnacnngcgnnnnnngcn

SEQ ID NO: 239 - DNA, 23 bp, Artificial Sequence
  Synthetic
  misc_feature (1)..(2): n is 5-(N-benzylcarboxyamide)-2'-deoxyuridine
  misc_feature (3)..(3): n is 2'-O-methyl-adenosine
  misc_feature (5)..(5): n is hexaethylene glycol
  misc_feature (7)..(8): n is 5-(N-benzylcarboxyamide)-2'-deoxyuridine
  misc_feature (11)..(11): n is hexaethylene glycol
  misc_feature (15)..(17): n is 5-(N-benzylcarboxyamide)-2'-deoxyuridine
  misc_feature (18)..(18): n is 2'-O-methyl-adenosine
  misc_feature (19)..(19): n is 5-(N-benzylcarboxyamide)-2'-deoxyuridine
  misc_feature (20)..(20): n is 2'-O-methyl-adenosine
  misc_feature (23)..(23): n is 2'-O-methyl-guanosine
nnncngnnacngcgnnnnnngcn

SEQ ID NO: 240 - DNA, 29 bp, Artificial Sequence
  Synthetic
  misc_feature (1)..(2): n is 5-(N-benzylcarboxyamide)-2'-deoxyuridine
  misc_feature (12)..(13): n is 5-(N-benzylcarboxyamide)-2'-deoxyuridine
  misc_feature (21)..(23): n is 5-(N-benzylcarboxyamide)-2'-deoxyuridine
  misc_feature (25)..(25): n is 5-(N-benzylcarboxyamide)-2'-deoxyuridine
nnacgcacgcgnnacacgcgnnnanagcg

SEQ ID NO: 241 - DNA, 27 bp, Artificial Sequence
  Synthetic
  misc_feature (1)..(2): n is 5-(N-benzylcarboxyamide)-2'-deoxyuridine
  misc_feature (10)..(11): n is 5-(N-benzylcarboxyamide)-2'-deoxyuridine
  misc_feature (19)..(21): n is 5-(N-benzylcarboxyamide)-2'-deoxyuridine
  misc_feature (23)..(23): n is 5-(N-benzylcarboxyamide)-2'-deoxyuridine
nnaccacggnnacacgcgnnnanagcg

SEQ ID NO: 242 - DNA, 24 bp, Artificial Sequence
  Synthetic
  misc_feature (1)..(2): n is 5-(N-benzylcarboxyamide)-2'-deoxyuridine
  misc_feature (3)..(3): n is 2'-O-methyl-adenosine
  misc_feature (5)..(5): n is hexaethylene glycol
  misc_feature (7)..(8): n is 5-(N-benzylcarboxyamide)-2'-deoxyuridine
  misc_feature (16)..(18): n is 5-(N-benzylcarboxyamide)-2'-deoxyuridine
  misc_feature (20)..(20): n is 5-(N-benzylcarboxyamide)-2'-deoxyuridine
  misc_feature (21)..(21): n is 2'-O-methyl-adenosine
  misc_feature (24)..(24): n is 2'-O-methyl-guanosine
nnncngnnactcgcgnnnanngcn

SEQ ID NO: 243 - DNA, 24 bp, Artificial Sequence
  Synthetic
  misc_feature (1)..(2): n is 5-(N-benzylcarboxyamide)-2'-deoxyuridine
  misc_feature (3)..(3): n is 2'-O-methyl-adenosine
  misc_feature (5)..(5): n is hexaethylene glycol
  misc_feature (7)..(8): n is 5-(N-benzylcarboxyamide)-2'-deoxyuridine
  misc_feature (16)..(18): n is 5-(N-benzylcarboxyamide)-2'-deoxyuridine
  misc_feature (20)..(20): n is 5-(N-benzylcarboxyamide)-2'-deoxyuridine
  misc_feature (21)..(21): n is 2'-O-methyl-adenosine
  misc_feature (24)..(24): n is 2'-O-methyl-guanosine
nnncngnnacccgcgnnnanngcn

SEQ ID NO: 244 - DNA, 24 bp, Artificial Sequence
  Synthetic
  misc_feature (1)..(2): n is 5-(N-benzylcarboxyamide)-2'-deoxyuridine
  misc_feature (3)..(3): n is 2'-O-methyl-adenosine
  misc_feature (5)..(5): n is hexaethylene glycol
  misc_feature (7)..(8): n is 5-(N-benzylcarboxyamide)-2'-deoxyuridine
  misc_feature (16)..(18): n is 5-(N-benzylcarboxyamide)-2'-deoxyuridine
  misc_feature (20)..(20): n is 5-(N-benzylcarboxyamide)-2'-deoxyuridine
  misc_feature (21)..(21): n is 2'-O-methyl-adenosine
  misc_feature (24)..(24): n is 2'-O-methyl-guanosine
nnncngnnacgcgcgnnnanngcn

SEQ ID NO: 245 - DNA, 24 bp, Artificial Sequence
  Synthetic
  misc_feature (1)..(2): n is 5-(N-benzylcarboxyamide)-2'-deoxyuridine
  misc_feature (3)..(3): n is 2'-O-methyl-adenosine
  misc_feature (5)..(5): n is hexaethylene glycol
  misc_feature (7)..(8): n is 5-(N-benzylcarboxyamide)-2'-deoxyuridine
  misc_feature (11)..(11): n is 2'-O-methyl-adenosine
  misc_feature (16)..(18): n is 5-(N-benzylcarboxyamide)-2'-deoxyuridine
  misc_feature (20)..(20): n is 5-(N-benzylcarboxyamide)-2'-deoxyuridine
  misc_feature (21)..(21): n is 2'-O-methyl-adenosine
  misc_feature (24)..(24): n is 2'-O-methyl-guanosine
nnncngnnacntgcgnnnanngcn

SEQ ID NO: 246 - DNA, 24 bp, Artificial Sequence
  Synthetic
  misc_feature (1)..(2): n is 5-(N-benzylcarboxyamide)-2'-deoxyuridine
  misc_feature (3)..(3): n is 2'-O-methyl-adenosine
  misc_feature (5)..(5): n is hexaethylene glycol
  misc_feature (7)..(8): n is 5-(N-benzylcarboxyamide)-2'-deoxyuridine
  misc_feature (11)..(11): n is 2'-O-methyl-adenosine
  misc_feature (16)..(18): n is 5-(N-benzylcarboxyamide)-2'-deoxyuridine
  misc_feature (20)..(20): n is 5-(N-benzylcarboxyamide)-2'-deoxyuridine
  misc_feature (21)..(21): n is 2'-O-methyl-adenosine
  misc_feature (24)..(24): n is 2'-O-methyl-guanosine
nnncngnnacnagcgnnnanngcn

SEQ ID NO: 247 - DNA, 24 bp, Artificial Sequence
  Synthetic
  misc_feature (1)..(2): n is 5-(N-benzylcarboxyamide)-2'-deoxyuridine
  misc_feature (3)..(3): n is 2'-O-methyl-adenosine
  misc_feature (5)..(5): n is hexaethylene glycol
  misc_feature (7)..(8): n is 5-(N-benzylcarboxyamide)-2'-deoxyuridine
  misc_feature (11)..(11): n is 2'-O-methyl-adenosine
  misc_feature (16)..(18): n is 5-(N-benzylcarboxyamide)-2'-deoxyuridine
  misc_feature (20)..(20): n is 5-(N-benzylcarboxyamide)-2'-deoxyuridine
  misc_feature (21)..(21): n is 2'-O-methyl-adenosine
  misc_feature (24)..(24): n is 2'-O-methyl-guanosine
nnncngnnacnggcgnnnanngcn

SEQ ID NO: 248 - DNA, 23 bp, Artificial Sequence
  Synthetic
  misc_feature (1)..(2): n is 5-(N-benzylcarboxyamide)-2'-deoxyuridine
  misc_feature (3)..(3): n is 2'-O-methyl-adenosine
  misc_feature (5)..(5): n is hexaethylene glycol
  misc_feature (7)..(8): n is 5-(N-benzylcarboxyamide)-2'-deoxyuridine
  misc_feature (15)..(17): n is 5-(N-benzylcarboxyamide)-2'-deoxyuridine
  misc_feature (19)..(19): n is 5-(N-benzylcarboxyamide)-2'-deoxyuridine
  misc_feature (20)..(20): n is 2'-O-methyl-adenosine
  misc_feature (23)..(23): n is 2'-O-methyl-guanosine
nnncngnnactgcgnnnanngcn

SEQ ID NO: 249 - DNA, 23 bp, Artificial Sequence
  Synthetic
  misc_feature (1)..(2): n is 5-(N-benzylcarboxyamide)-2'-deoxyuridine
  misc_feature (3)..(3): n is 2'-O-methyl-adenosine
  misc_feature (5)..(5): n is hexaethylene glycol
  misc_feature (7)..(8): n is 5-(N-benzylcarboxyamide)-2'-deoxyuridine
  misc_feature (15)..(17): n is 5-(N-benzylcarboxyamide)-2'-deoxyuridine
  misc_feature (19)..(19): n is 5-(N-benzylcarboxyamide)-2'-deoxyuridine
  misc_feature (20)..(20): n is 2'-O-methyl-adenosine
  misc_feature (23)..(23): n is 2'-O-methyl-guanosine
nnncngnnacagcgnnnanngcn

SEQ ID NO: 250 - DNA, 23 bp, Artificial Sequence
  Synthetic
  misc_feature (1)..(2): n is 5-(N-benzylcarboxyamide)-2'-deoxyuridine
  misc_feature (3)..(3): n is 2'-O-methyl-adenosine
  misc_feature (5)..(5): n is hexaethylene glycol
  misc_feature (7)..(8): n is 5-(N-benzylcarboxyamide)-2'-deoxyuridine
  misc_feature (15)..(17): n is 5-(N-benzylcarboxyamide)-2'-deoxyuridine
  misc_feature (19)..(19): n is 5-(N-benzylcarboxyamide)-2'-deoxyuridine
  misc_feature (20)..(20): n is 2'-O-methyl-adenosine
  misc_feature (23)..(23): n is 2'-O-methyl-guanosine
nnncngnnacggcgnnnanngcn

SEQ ID NO: 251 - DNA, 23 bp, Artificial Sequence
  Synthetic
  misc_feature (1)..(2): n is 5-(N-benzylcarboxyamide)-2'-deoxyuridine
  misc_feature (3)..(3): n is 2'-O-methyl-adenosine
  misc_feature (5)..(5): n is hexaethylene glycol
  misc_feature (7)..(8): n is 5-(N-benzylcarboxyamide)-2'-deoxyuridine
  misc_feature (15)..(17): n is 5-(N-benzylcarboxyamide)-2'-deoxyuridine
  misc_feature (19)..(19): n is 5-(N-benzylcarboxyamide)-2'-deoxyuridine
  misc_feature (20)..(20): n is 2'-O-methyl-adenosine
  misc_feature (23)..(23): n is 2'-O-methyl-guanosine
nnncngnnaccgcgnnnanngcn

SEQ ID NO: 252 - DNA, 24 bp, Artificial Sequence
  Synthetic
  misc_feature (1)..(2): n is 5-(N-benzylcarboxyamide)-2'-deoxyuridine
  misc_feature (3)..(3): n is 2'-O-methyl-adenosine
  misc_feature (5)..(5): n is hexaethylene glycol
  misc_feature (7)..(7): n is 5-(N-benzylcarboxyamide)-2'-O-methyl-uridine
  misc_feature (8)..(8): n is 5-(N-benzylcarboxyamide)-2'-deoxyuridine
  misc_feature (11)..(11): n is 2'-O-methyl-adenosine
  misc_feature (16)..(18): n is 5-(N-benzylcarboxyamide)-2'-deoxyuridine
  misc_feature (20)..(20): n is 5-(N-benzylcarboxyamide)-2'-deoxyuridine
  misc_feature (21)..(21): n is 2'-O-methyl-adenosine
  misc_feature (24)..(24): n is 2'-O-methyl-guanosine
nnncngnnacncgcgnnnanngcn

SEQ ID NO: 253 - DNA, 24 bp, Artificial Sequence
  Synthetic
  misc_feature (1)..(2): n is 5-(N-benzylcarboxyamide)-2'-deoxyuridine
  misc_feature (3)..(3): n is 2'-O-methyl-adenosine
  misc_feature (5)..(5): n is hexaethylene glycol
  misc_feature (7)..(7): n is 5-(N-benzylcarboxyamide)-2'-deoxyuridine
  misc_feature (8)..(8): n is 5-(N-benzylcarboxyamide)-2'-O-methyl-uridine
  misc_feature (11)..(11): n is 2'-O-methyl-adenosine
  misc_feature (16)..(18): n is 5-(N-benzylcarboxyamide)-2'-deoxyuridine
  misc_feature (20)..(20): n is 5-(N-benzylcarboxyamide)-2'-deoxyuridine
  misc_feature (21)..(21): n is 2'-O-methyl-adenosine
  misc_feature (24)..(24): n is 2'-O-methyl-guanosine
nnncngnnacncgcgnnnanngcn

SEQ ID NO: 254 - DNA, 24 bp, Artificial Sequence
  Synthetic
  misc_feature (1)..(2): n is 5-(N-benzylcarboxyamide)-2'-deoxyuridine
  misc_feature (3)..(3): n is 2'-O-methyl-adenosine
  misc_feature (5)..(5): n is hexaethylene glycol
  misc_feature (7)..(8): n is 5-(N-benzylcarboxyamide)-2'-deoxyuridine
  misc_feature (11)..(11): n is 2'-O-methyl-adenosine
  misc_feature (16)..(17): n is 5-(N-benzylcarboxyamide)-2'-deoxyuridine
  misc_feature (18)..(18): n is 5-(N-benzylcarboxyamide)-2'-O-methyl-uridine
  misc_feature (20)..(20): n is 5-(N-benzylcarboxyamide)-2'-deoxyuridine
  misc_feature (21)..(21): n is 2'-O-methyl-adenosine
  misc_feature (24)..(24): n is 2'-O-methyl-guanosine
nnncngnnacncgcgnnnanngcn

SEQ ID NO: 255 - DNA, 24 bp, Artificial Sequence
  Synthetic
  misc_feature (1)..(2): n is 5-(N-benzylcarboxyamide)-2'-deoxyuridine
  misc_feature (3)..(3): n is 2'-O-methyl-adenosine
  misc_feature (5)..(5): n is hexaethylene glycol
  misc_feature (7)..(8): n is 5-(N-benzylcarboxyamide)-2'-deoxyuridine
  misc_feature (11)..(11): n is 2'-O-methyl-adenosine
  misc_feature (16)..(18): n is 5-(N-benzylcarboxyamide)-2'-deoxyuridine
  misc_feature (20)..(20): n is 5-(N-benzylcarboxyamide)-2'-O-methyl-uridine
  misc_feature (21)..(21): n is 2'-O-methyl-adenosine
  misc_feature (24)..(24): n is 2'-O-methyl-guanosine
nnncngnnacncgcgnnnanngcn

SEQ ID NO: 256 - DNA, 24 bp, Artificial Sequence
  Synthetic
  misc_feature (1)..(2): n is 5-(N-benzylcarboxyamide)-2'-deoxyuridine
  misc_feature (3)..(3): n is 2'-O-methyl-adenosine
  misc_feature (5)..(5): n is hexaethylene glycol
  misc_feature (7)..(8): n is 5-(N-benzylcarboxyamide)-2'-deoxyuridine
  misc_feature (11)..(11): n is 2'-O-methyl-adenosine
  misc_feature (16)..(16): n is 5-(N-benzylcarboxyamide)-2'-deoxyuridine
  misc_feature (17)..(17): n is 5-[N-(phenyl-2-ethyl)-carboxyamide]-2'-deoxyuridine
  misc_feature (18)..(18): n is 5-(N-benzylcarboxyamide)-2'-deoxyuridine
  misc_feature (20)..(20): n is 5-[N-(3,4-methylenedioxyphenyl-methyl)carboxyamide]-2'-deoxyuridi ne
  misc_feature (21)..(21): n is 2'-O-methyl-adenosine
  misc_feature (24)..(24): n is 2'-O-methyl-guanosine
nnncngnnacncgcgnnnanngcn

SEQ ID NO: 257 - DNA, 24 bp, Artificial Sequence
  Synthetic
  misc_feature (1)..(2): n is 5-(N-benzylcarboxyamide)-2'-deoxyuridine
  misc_feature (3)..(3): n is 2'-O-methyl-adenosine
  misc_feature (5)..(5): n is hexaethylene glycol
  misc_feature (7)..(8): n is 5-(N-benzylcarboxyamide)-2'-deoxyuridine
  misc_feature (11)..(11): n is 2'-O-methyl-adenosine
  misc_feature (16)..(16): n is 5-(N-benzylcarboxyamide)-2'-deoxyuridine
  misc_feature (17)..(17): n is 5-[N-(phenyl-2-ethyl)-carboxyamide]-2'-deoxyuridine
  misc_feature (18)..(18): n is 5-[N-(2-thiophene-methyl)carboxyamide]-2'-deoxyuridine
  misc_feature (20)..(20): n is 5-[N-(3,4-methylenedioxyphenyl-methyl)carboxyamide]-2'-deoxyuridi ne
  misc_feature (21)..(21): n is 2'-O-methyl-adenosine
  misc_feature (24)..(24): n is 2'-O-methyl-guanosine
nnncngnnacncgcgnnnanngcn

SEQ ID NO: 258 - DNA, 24 bp, Artificial Sequence
  Synthetic
  misc_feature (1)..(2): n is 5-(N-benzylcarboxyamide)-2'-deoxyuridine
  misc_feature (3)..(3): n is 2'-O-methyl-adenosine
  misc_feature (5)..(5): n is hexaethylene glycol
  misc_feature (7)..(8): n is 5-(N-benzylcarboxyamide)-2'-deoxyuridine
  misc_feature (11)..(11): n is 2'-O-methyl-adenosine
  misc_feature (12)..(12): n is 2'-O-methyl-cytidine
  misc_feature (16)..(16): n is 5-(N-benzylcarboxyamide)-2'-deoxyuridine
  misc_feature (17)..(17): n is 5-[N-(phenyl-2-ethyl)-carboxyamide]-2'-deoxyuridine
  misc_feature (18)..(18): n is 5-[N-(2-thiophene-methyl)carboxyamide]-2'-deoxyuridine
  misc_feature (19)..(19): n is 2'-O-methyl-adenosine
  misc_feature (20)..(20): n is 5-(N-benzylcarboxyamide)-2'-deoxyuridine
  misc_feature (21)..(21): n is 2'-O-methyl-adenosine
  misc_feature (24)..(24): n is 2'-O-methyl-guanosine
nnncngnnacnngcgnnnnnngcn

SEQ ID NO: 259 - DNA, 24 bp, Artificial Sequence
  Synthetic
  misc_feature (1)..(2): n is 5-(N-benzylcarboxyamide)-2'-deoxyuridine
  misc_feature (3)..(3): n is 2'-O-methyl-adenosine
  misc_feature (5)..(5): n is hexaethylene glycol
  misc_feature (7)..(8): n is 5-(N-benzylcarboxyamide)-2'-deoxyuridine
  misc_feature (11)..(11): n is 2'-O-methyl-adenosine
  misc_feature (12)..(12): n is 2'-O-methyl-cytidine
  misc_feature (16)..(16): n is 5-[N-(2-thiophene-methyl)carboxyamide]-2'-deoxyuridine
  misc_feature (17)..(17): n is 5-[N-(phenyl-2-ethyl)-carboxyamide]-2'-deoxyuridine
  misc_feature (18)..(18): n is 5-[N-(2-thiophene-methyl)carboxyamide]-2'-deoxyuridine
  misc_feature (19)..(19): n is 2'-O-methyl-adenosine
  misc_feature (20)..(20): n is 5-(N-benzylcarboxyamide)-2'-deoxyuridine
  misc_feature (21)..(21): n is 2'-O-methyl-adenosine
  misc_feature (24)..(24): n is 2'-O-methyl-guanosine
nnncngnnacnngcgnnnnnngcn

SEQ ID NO: 260 - DNA, 24 bp, Artificial Sequence
  Synthetic
  misc_feature (1)..(2): n is 5-(N-benzylcarboxyamide)-2'-deoxyuridine
  misc_feature (3)..(3): n is 2'-O-methyl-adenosine
  misc_feature (5)..(5): n is hexaethylene glycol
  misc_feature (7)..(7): n is 5-(N-benzylcarboxyamide)-2'-O-methyl-uridine
  misc_feature (8)..(8): n is 5-(N-benzylcarboxyamide)-2'-deoxyuridine
  misc_feature (11)..(11): n is 2'-O-methyl-adenosine
  misc_feature (12)..(12): n is 2'-O-methyl-cytidine
  misc_feature (16)..(18): n is 5-(N-benzylcarboxyamide)-2'-deoxyuridine
  misc_feature (19)..(19): n is 2'-O-methyl-adenosine
  misc_feature (20)..(20): n is 5-(N-benzylcarboxyamide)-2'-deoxyuridine
  misc_feature (21)..(21): n is 2'-O-methyl-adenosine
  misc_feature (24)..(24): n is 2'-O-methyl-guanosine
nnncngnnacnngcgnnnnnngcn

SEQ ID NO: 261 - DNA, 24 bp, Artificial Sequence
  Synthetic
  misc_feature (1)..(2): n is 5-(N-benzylcarboxyamide)-2'-deoxyuridine
  misc_feature (3)..(3): n is 2'-O-methyl-adenosine
  misc_feature (5)..(5): n is hexaethylene glycol
  misc_feature (7)..(8): n is 5-(N-benzylcarboxyamide)-2'-deoxyuridine
  misc_feature (11)..(11): n is 2'-O-methyl-adenosine
  misc_feature (12)..(12): n is 2'-O-methyl-cytidine
  misc_feature (16)..(17): n is 5-(N-benzylcarboxyamide)-2'-deoxyuridine
  misc_feature (18)..(18): n is 5-(N-benzylcarboxyamide)-2'-O-methyl-uridine
  misc_feature (19)..(19): n is 2'-O-methyl-adenosine
  misc_feature (20)..(20): n is 5-(N-benzylcarboxyamide)-2'-deoxyuridine
  misc_feature (21)..(21): n is 2'-O-methyl-adenosine
  misc_feature (24)..(24): n is 2'-O-methyl-guanosine
nnncngnnacnngcgnnnnnngcn

SEQ ID NO: 262 - DNA, 24 bp, Artificial Sequence
  Synthetic
  misc_feature (1)..(2): n is 5-(N-benzylcarboxyamide)-2'-deoxyuridine
  misc_feature (3)..(3): n is 2'-O-methyl-adenosine
  misc_feature (5)..(5): n is hexaethylene glycol
  misc_feature (7)..(7): n is 5-(N-benzylcarboxyamide)-2'-O-methyl-uridine
  misc_feature (8)..(8): n is 5-(N-benzylcarboxyamide)-2'-deoxyuridine
  misc_feature (11)..(11): n is 2'-O-methyl-adenosine
  misc_feature (12)..(12): n is 2'-O-methyl-cytidine
  misc_feature (16)..(17): n is 5-(N-benzylcarboxyamide)-2'-deoxyuridine
  misc_feature (18)..(18): n is 5-(N-benzylcarboxyamide)-2'-O-methyl-uridine
  misc_feature (19)..(19): n is 2'-O-methyl-adenosine
  misc_feature (20)..(20): n is 5-(N-benzylcarboxyamide)-2'-deoxyuridine
  misc_feature (21)..(21): n is 2'-O-methyl-adenosine
  misc_feature (24)..(24): n is 2'-O-methyl-guanosine
nnncngnnacnngcgnnnnnngcn

SEQ ID NO: 263 - DNA, 24 bp, Artificial Sequence
  Synthetic
  misc_feature (1)..(2): n is 5-(N-benzylcarboxyamide)-2'-deoxyuridine
  misc_feature (3)..(3): n is 2'-O-methyl-adenosine
  misc_feature (5)..(5): n is hexaethylene glycol
  misc_feature (7)..(8): n is 5-(N-benzylcarboxyamide)-2'-deoxyuridine
  misc_feature (11)..(11): n is 2'-O-methyl-adenosine
  misc_feature (12)..(12): n is 2'-O-methyl-cytidine
  misc_feature (16)..(16): n is 5-(N-benzylcarboxyamide)-2'-deoxyuridine
  misc_feature (17)..(17): n is 5-[N-(phenyl-2-ethyl)-carboxyamide]-2'-deoxyuridine
  misc_feature (18)..(18): n is 5-(N-benzylcarboxyamide)-2'-O-methyl-uridine
  misc_feature (19)..(19): n is 2'-O-methyl-adenosine
  misc_feature (20)..(20): n is 5-(N-benzylcarboxyamide)-2'-deoxyuridine
  misc_feature (21)..(21): n is 2'-O-methyl-adenosine
  misc_feature (24)..(24): n is 2'-O-methyl-guanosine
nnncngnnacnngcgnnnnnngcn

SEQ ID NO: 264 - DNA, 24 bp, Artificial Sequence
  Synthetic
  misc_feature (1)..(2): n is 5-(N-benzylcarboxyamide)-2'-deoxyuridine
  misc_feature (3)..(3): n is 2'-O-methyl-adenosine
  misc_feature (5)..(5): n is hexaethylene glycol
  misc_feature (7)..(8): n is 5-(N-benzylcarboxyamide)-2'-deoxyuridine
  misc_feature (11)..(11): n is 2'-O-methyl-adenosine
  misc_feature (12)..(12): n is 2'-O-methyl-cytidine
  misc_feature (16)..(18): n is 5-(N-benzylcarboxyamide)-2'-deoxyuridine
  misc_feature (19)..(19): n is 2'-O-methyl-adenosine
  misc_feature (20)..(20): n is 5-[N-(3,4-methylenedioxyphenyl-methyl)carboxyamide]-2'-deoxyuridi ne
  misc_feature (21)..(21): n is 2'-O-methyl-adenosine
  misc_feature (24)..(24): n is 2'-O-methyl-guanosine
nnncngnnacnngcgnnnnnngcn

SEQ ID NO: 265 - DNA, 24 bp, Artificial Sequence
  Synthetic
  misc_feature (1)..(2): n is 5-(N-benzylcarboxyamide)-2'-deoxyuridine
  misc_feature (3)..(3): n is 2'-O-methyl-adenosine
  misc_feature (5)..(5): n is hexaethylene glycol
  misc_feature (7)..(8): n is 5-(N-benzylcarboxyamide)-2'-deoxyuridine
  misc_feature (11)..(11): n is 2'-O-methyl-adenosine
  misc_feature (12)..(12): n is 2'-O-methyl-cytidine
  misc_feature (16)..(16): n is 5-(N-benzylcarboxyamide)-2'-deoxyuridine
  misc_feature (17)..(17): n is 5-[N-(phenyl-2-ethyl)-carboxyamide]-2'-deoxyuridine
  misc_feature (18)..(18): n is 5-(N-benzylcarboxyamide)-2'-deoxyuridine
  misc_feature (19)..(19): n is 2'-O-methyl-adenosine
  misc_feature (20)..(20): n is 5-[N-(3,4-methylenedioxyphenyl-methyl)carboxyamide]-2'-deoxyuridi ne
  misc_feature (21)..(21): n is 2'-O-methyl-adenosine
  misc_feature (24)..(24): n is 2'-O-methyl-guanosine
nnncngnnacnngcgnnnnnngcn

SEQ ID NO: 266 - DNA, 24 bp, Artificial Sequence
  Synthetic
  misc_feature (1)..(2): n is 5-(N-benzylcarboxyamide)-2'-deoxyuridine
  misc_feature (3)..(3): n is 2'-O-methyl-adenosine
  misc_feature (5)..(5): n is hexaethylene glycol
  misc_feature (7)..(8): n is 5-(N-benzylcarboxyamide)-2'-deoxyuridine
  misc_feature (11)..(11): n is 2'-O-methyl-adenosine
  misc_feature (12)..(12): n is 2'-O-methyl-cytidine
  misc_feature (16)..(16): n is 5-(N-benzylcarboxyamide)-2'-deoxyuridine
  misc_feature (17)..(17): n is 5-[N-(phenyl-2-ethyl)-carboxyamide]-2'-deoxyuridine
  misc_feature (18)..(18): n is 5-[N-(2-thiophene-methyl)carboxyamide]-2'-deoxyuridine
  misc_feature (19)..(19): n is 2'-O-methyl-adenosine
  misc_feature (20)..(20): n is 5-[N-(3,4-methylenedioxyphenyl-methyl)carboxyamide]-2'-deoxyuridi ne
  misc_feature (21)..(21): n is 2'-O-methyl-adenosine
  misc_feature (24)..(24): n is 2'-O-methyl-guanosine
nnncngnnacnngcgnnnnnngcn

SEQ ID NO: 267 - DNA, 24 bp, Artificial Sequence
  Synthetic
  misc_feature (1)..(2): n is 5-(N-benzylcarboxyamide)-2'-deoxyuridine
  misc_feature (3)..(3): n is 2'-O-methyl-adenosine
  misc_feature (5)..(5): n is hexaethylene glycol
  misc_feature (7)..(8): n is 5-(N-benzylcarboxyamide)-2'-deoxyuridine
  misc_feature (11)..(11): n is 1,3-propane diol
  misc_feature (12)..(12): n is 2'-O-methyl-cytidine
  misc_feature (16)..(16): n is 5-(N-benzylcarboxyamide)-2'-deoxyuridine
  misc_feature (17)..(17): n is 5-[N-(phenyl-2-ethyl)-carboxyamide]-2'-deoxyuridine
  misc_feature (18)..(18): n is 5-(N-benzylcarboxyamide)-2'-deoxyuridine
  misc_feature (19)..(19): n is 2'-O-methyl-adenosine
  misc_feature (20)..(20): n is 5-[N-(3,4-methylenedioxyphenyl-methyl)carboxyamide]-2'-deoxyuridi ne
  misc_feature (21)..(21): n is 2'-O-methyl-adenosine
  misc_feature (24)..(24): n is 2'-O-methyl-guanosine
nnncngnnacnngcgnnnnnngcn

SEQ ID NO: 268 - DNA, 24 bp, Artificial Sequence
  Synthetic
  misc_feature (1)..(2): n is 5-(N-benzylcarboxyamide)-2'-deoxyuridine
  misc_feature (3)..(3): n is 2'-O-methyl-adenosine
  misc_feature (5)..(5): n is hexaethylene glycol
  misc_feature (7)..(8): n is 5-(N-benzylcarboxyamide)-2'-deoxyuridine
  misc_feature (11)..(11): n is 1,3-propane diol
  misc_feature (12)..(12): n is 2'-O-methyl-cytidine
  misc_feature (16)..(16): n is 5-(N-benzylcarboxyamide)-2'-deoxyuridine
  misc_feature (17)..(17): n is 5-[N-(phenyl-2-ethyl)-carboxyamide]-2'-deoxyuridine
  misc_feature (18)..(18): n is 5-[N-(2-thiophene-methyl)carboxyamide]-2'-deoxyuridine
  misc_feature (19)..(19): n is 2'-O-methyl-adenosine
  misc_feature (20)..(20): n is 5-[N-(3,4-methylenedioxyphenyl-methyl)carboxyamide]-2'-deoxyuridi ne
  misc_feature (21)..(21): n is 2'-O-methyl-adenosine
  misc_feature (24)..(24): n is 2'-O-methyl-guanosine
nnncngnnacnngcgnnnnnngcn

SEQ ID NO: 269 - DNA, 50 bp, Artificial Sequence
  Synthetic
  misc_feature (1)..(2): n is 5-(N-benzylcarboxyamide)-2'-deoxyuridine
  misc_feature (3)..(3): n is 2'-O-methyl-adenosine
  misc_feature (5)..(5): n is hexaethylene glycol
  misc_feature (7)..(8): n is 5-(N-benzylcarboxyamide)-2'-deoxyuridine
  misc_feature (11)..(11): n is 2'-O-methyl-adenosine
  misc_feature (16)..(16): n is 5-(N-benzylcarboxyamide)-2'-deoxyuridine
  misc_feature (17)..(17): n is 5-[N-(phenyl-2-ethyl)-carboxyamide]-2'-deoxyuridine
  misc_feature (18)..(18): n is 5-[N-(2-thiophene-methyl)carboxyamide]-2'-deoxyuridine
  misc_feature (20)..(20): n is 5-(N-benzylcarboxyamide)-2'-deoxyuridine
  misc_feature (21)..(21): n is 2'-O-methyl-adenosine
  misc_feature (24)..(24): n is 2'-O-methyl-guanosine
  misc_feature (25)..(26): n is hexaethylene glycol
  misc_feature (27)..(28): n is 5-(N-benzylcarboxyamide)-2'-deoxyuridine
  misc_feature (29)..(29): n is 2'-O-methyl-adenosine
  misc_feature (31)..(31): n is hexaethylene glycol
  misc_feature (33)..(34): n is 5-(N-benzylcarboxyamide)-2'-deoxyuridine
  misc_feature (37)..(37): n is 2'-O-methyl-adenosine
  misc_feature (42)..(42): n is 5-(N-benzylcarboxyamide)-2'-deoxyuridine
  misc_feature (43)..(43): n is 5-[N-(phenyl-2-ethyl)-carboxyamide]-2'-deoxyuridine
  misc_feature (44)..(44): n is 5-[N-(2-thiophene-methyl)carboxyamide]-2'-deoxyuridine
  misc_feature (46)..(46): n is 5-(N-benzylcarboxyamide)-2'-deoxyuridine
  misc_feature (47)..(47): n is 2'-O-methyl-adenosine
  misc_feature (50)..(50): n is 2'-O-methyl-guanosine
nnncngnnacncgcgnnnanngcnnnnnncngnnacncgcgnnnanngcn

SEQ ID NO: 270 - DNA, 51 bp, Artificial Sequence
  Synthetic
  misc_feature (1)..(2): n is 5-(N-benzylcarboxyamide)-2'-deoxyuridine
  misc_feature (3)..(3): n is 2'-O-methyl-adenosine
  misc_feature (5)..(5): n is hexaethylene glycol
  misc_feature (7)..(8): n is 5-(N-benzylcarboxyamide)-2'-deoxyuridine
  misc_feature (11)..(11): n is 2'-O-methyl-adenosine
  misc_feature (16)..(16): n is 5-(N-benzylcarboxyamide)-2'-deoxyuridine
  misc_feature (17)..(17): n is 5-[N-(phenyl-2-ethyl)-carboxyamide]-2'-deoxyuridine
  misc_feature (18)..(18): n is 5-[N-(2-thiophene-methyl)carboxyamide]-2'-deoxyuridine
  misc_feature (20)..(20): n is 5-(N-benzylcarboxyamide)-2'-deoxyuridine
  misc_feature (21)..(21): n is 2'-O-methyl-adenosine
  misc_feature (24)..(24): n is 2'-O-methyl-guanosine
  misc_feature (25)..(27): n is hexaethylene glycol
  misc_feature (28)..(29): n is 5-(N-benzylcarboxyamide)-2'-deoxyuridine
  misc_feature (30)..(30): n is 2'-O-methyl-adenosine
  misc_feature (32)..(32): n is hexaethylene glycol
  misc_feature (34)..(35): n is 5-(N-benzylcarboxyamide)-2'-deoxyuridine
  misc_feature (38)..(38): n is 2'-O-methyl-adenosine
  misc_feature (43)..(43): n is 5-(N-benzylcarboxyamide)-2'-deoxyuridine
  misc_feature (44)..(44): n is 5-[N-(phenyl-2-ethyl)-carboxyamide]-2'-deoxyuridine
  misc_feature (45)..(45): n is 5-[N-(2-thiophene-methyl)carboxyamide]-2'-deoxyuridine
  misc_feature (47)..(47): n is 5-(N-benzylcarboxyamide)-2'-deoxyuridine
  misc_feature (48)..(48): n is 2'-O-methyl-adenosine
  misc_feature (51)..(51): n is 2'-O-methyl-guanosine
nnncngnnacncgcgnnnanngcnnnnnnncngnnacncgcgnnnanngcn

SEQ ID NO: 271 - DNA, 52 bp, Artificial Sequence
  Synthetic
  misc_feature (1)..(2): n is 5-(N-benzylcarboxyamide)-2'-deoxyuridine
  misc_feature (3)..(3): n is 2'-O-methyl-adenosine
  misc_feature (5)..(5): n is hexaethylene glycol
  misc_feature (7)..(8): n is 5-(N-benzylcarboxyamide)-2'-deoxyuridine
  misc_feature (11)..(11): n is 2'-O-methyl-adenosine
  misc_feature (16)..(16): n is 5-(N-benzylcarboxyamide)-2'-deoxyuridine
  misc_feature (17)..(17): n is 5-[N-(phenyl-2-ethyl)-carboxyamide]-2'-deoxyuridine
  misc_feature (18)..(18): n is 5-[N-(2-thiophene-methyl)carboxyamide]-2'-deoxyuridine
  misc_feature (20)..(20): n is 5-(N-benzylcarboxyamide)-2'-deoxyuridine
  misc_feature (21)..(21): n is 2'-O-methyl-adenosine
  misc_feature (24)..(24): n is 2'-O-methyl-guanosine
  misc_feature (25)..(28): n is hexaethylene glycol
  misc_feature (29)..(30): n is 5-(N-benzylcarboxyamide)-2'-deoxyuridine
  misc_feature (31)..(31): n is 2'-O-methyl-adenosine
  misc_feature (33)..(33): n is hexaethylene glycol
  misc_feature (35)..(36): n is 5-(N-benzylcarboxyamide)-2'-deoxyuridine
  misc_feature (39)..(39): n is 2'-O-methyl-adenosine
  misc_feature (44)..(44): n is 5-(N-benzylcarboxyamide)-2'-deoxyuridine
  misc_feature (45)..(45): n is 5-[N-(phenyl-2-ethyl)-carboxyamide]-2'-deoxyuridine
  misc_feature (46)..(46): n is 5-[N-(2-thiophene-methyl)carboxyamide]-2'-deoxyuridine
  misc_feature (48)..(48): n is 5-(N-benzylcarboxyamide)-2'-deoxyuridine
  misc_feature (49)..(49): n is 2'-O-methyl-adenosine
  misc_feature (52)..(52): n is 2'-O-methyl-guanosine
nnncngnnacncgcgnnnanngcnnnnnnnncngnnacncgcgnnnanngcn

SEQ ID NO: 272 - DNA, 53 bp, Artificial Sequence
  Synthetic
  misc_feature (1)..(2): n is 5-(N-benzylcarboxyamide)-2'-deoxyuridine
  misc_feature (3)..(3): n is 2'-O-methyl-adenosine
  misc_feature (5)..(5): n is hexaethylene glycol
  misc_feature (7)..(8): n is 5-(N-benzylcarboxyamide)-2'-deoxyuridine
  misc_feature (11)..(11): n is 2'-O-methyl-adenosine
  misc_feature (16)..(16): n is 5-(N-benzylcarboxyamide)-2'-deoxyuridine
  misc_feature (17)..(17): n is 5-[N-(phenyl-2-ethyl)-carboxyamide]-2'-deoxyuridine
  misc_feature (18)..(18): n is 5-[N-(2-thiophene-methyl)carboxyamide]-2'-deoxyuridine
  misc_feature (20)..(20): n is 5-(N-benzylcarboxyamide)-2'-deoxyuridine
  misc_feature (21)..(21): n is 2'-O-methyl-adenosine
  misc_feature (24)..(24): n is 2'-O-methyl-guanosine
  misc_feature (25)..(29): n is hexaethylene glycol
  misc_feature (30)..(31): n is 5-(N-benzylcarboxyamide)-2'-deoxyuridine
  misc_feature (32)..(32): n is 2'-O-methyl-adenosine
  misc_feature (34)..(34): n is hexaethylene glycol
  misc_feature (36)..(37): n is 5-(N-benzylcarboxyamide)-2'-deoxyuridine
  misc_feature (40)..(40): n is 2'-O-methyl-adenosine
  misc_feature (45)..(45): n is 5-(N-benzylcarboxyamide)-2'-deoxyuridine
  misc_feature (46)..(46): n is 5-[N-(phenyl-2-ethyl)-carboxyamide]-2'-deoxyuridine
  misc_feature (47)..(47): n is 5-[N-(2-thiophene-methyl)carboxyamide]-2'-deoxyuridine
  misc_feature (49)..(49): n is 5-(N-benzylcarboxyamide)-2'-deoxyuridine
  misc_feature (50)..(50): n is 2'-O-methyl-adenosine
  misc_feature (53)..(53): n is 2'-O-methyl-guanosine
nnncngnnacncgcgnnnanngcnnnnnnnnncngnnacncgcgnnnanngcn

SEQ ID NO: 273 - DNA, 54 bp, Artificial Sequence
  Synthetic
  misc_feature (1)..(2): n is 5-(N-benzylcarboxyamide)-2'-deoxyuridine
  misc_feature (3)..(3): n is 2'-O-methyl-adenosine
  misc_feature (5)..(5): n is hexaethylene glycol
  misc_feature (7)..(8): n is 5-(N-benzylcarboxyamide)-2'-deoxyuridine
  misc_feature (11)..(11): n is 2'-O-methyl-adenosine
  misc_feature (16)..(16): n is 5-(N-benzylcarboxyamide)-2'-deoxyuridine
  misc_feature (17)..(17): n is 5-[N-(phenyl-2-ethyl)-carboxyamide]-2'-deoxyuridine
  misc_feature (18)..(18): n is 5-[N-(2-thiophene-methyl)carboxyamide]-2'-deoxyuridine
  misc_feature (20)..(20): n is 5-(N-benzylcarboxyamide)-2'-deoxyuridine
  misc_feature (21)..(21): n is 2'-O-methyl-adenosine
  misc_feature (24)..(24): n is 2'-O-methyl-guanosine
  misc_feature (25)..(30): n is hexaethylene glycol
  misc_feature (31)..(32): n is 5-(N-benzylcarboxyamide)-2'-deoxyuridine
  misc_feature (33)..(33): n is 2'-O-methyl-adenosine
  misc_feature (35)..(35): n is hexaethylene glycol
  misc_feature (37)..(38): n is 5-(N-benzylcarboxyamide)-2'-deoxyuridine
  misc_feature (41)..(41): n is 2'-O-methyl-adenosine
  misc_feature (46)..(46): n is 5-(N-benzylcarboxyamide)-2'-deoxyuridine
  misc_feature (47)..(47): n is 5-[N-(phenyl-2-ethyl)-carboxyamide]-2'-deoxyuridine
  misc_feature (48)..(48): n is 5-[N-(2-thiophene-methyl)carboxyamide]-2'-deoxyuridine
  misc_feature (50)..(50): n is 5-(N-benzylcarboxyamide)-2'-deoxyuridine
  misc_feature (51)..(51): n is 2'-O-methyl-adenosine
  misc_feature (54)..(54): n is 2'-O-methyl-guanosine
nnncngnnacncgcgnnnanngcnnnnnnnnnncngnnacncgcgnnnanngcn

SEQ ID NO: 274 - DNA, 27 bp, Artificial Sequence
  Synthetic
  misc_feature (1)..(2): n is 5-(N-benzylcarboxyamide)-2'-deoxyuridine
  misc_feature (3)..(3): n is 2'-O-methyl-adenosine
  misc_feature (5)..(5): n is hexaethylene glycol
  misc_feature (7)..(8): n is 5-(N-benzylcarboxyamide)-2'-deoxyuridine
  misc_feature (11)..(11): n is 2'-O-methyl-adenosine
  misc_feature (16)..(16): n is 5-(N-benzylcarboxyamide)-2'-deoxyuridine
  misc_feature (17)..(17): n is 5-[N-(phenyl-2-ethyl)-carboxyamide]-2'-deoxyuridine
  misc_feature (18)..(18): n is 5-[N-(2-thiophene-methyl)carboxyamide]-2'-deoxyuridine
  misc_feature (20)..(20): n is 5-(N-benzylcarboxyamide)-2'-deoxyuridine
  misc_feature (21)..(21): n is 2'-O-methyl-adenosine
  misc_feature (24)..(24): n is 2'-O-methyl-guanosine
  misc_feature (25)..(25): n is 1,3-propane diol
  misc_feature (26)..(26): n is 1,3-bis-[5-hydroxy-pentylamido]-2-propanol
nnncngnnacncgcgnnnanngcnnnt

SEQ ID NO: 275 - DNA, 27 bp, Artificial Sequence
  Synthetic
  misc_feature (1)..(2): n is 5-(N-benzylcarboxyamide)-2'-deoxyuridine
  misc_feature (3)..(3): n is 2'-O-methyl-adenosine
  misc_feature (5)..(5): n is hexaethylene glycol
  misc_feature (7)..(8): n is 5-(N-benzylcarboxyamide)-2'-deoxyuridine
  misc_feature (11)..(11): n is 2'-O-methyl-adenosine
  misc_feature (16)..(16): n is 5-(N-benzylcarboxyamide)-2'-deoxyuridine
  misc_feature (17)..(17): n is 5-[N-(phenyl-2-ethyl)-carboxyamide]-2'-deoxyuridine
  misc_feature (18)..(18): n is 5-[N-(2-thiophene-methyl)carboxyamide]-2'-deoxyuridine
  misc_feature (20)..(20): n is 5-(N-benzylcarboxyamide)-2'-deoxyuridine
  misc_feature (21)..(21): n is 2'-O-methyl-adenosine
  misc_feature (24)..(24): n is 2'-O-methyl-guanosine
  misc_feature (25)..(25): n is hexaethylene glycol
  misc_feature (26)..(26): n is 1,3-bis-[5-hydroxy-pentylamido]-2-propanol
nnncngnnacncgcgnnnanngcnnnt

SEQ ID NO: 276 - DNA, 28 bp, Artificial Sequence
  Synthetic
  misc_feature (1)..(2): n is 5-(N-benzylcarboxyamide)-2'-deoxyuridine
  misc_feature (3)..(3): n is 2'-O-methyl-adenosine
  misc_feature (5)..(5): n is hexaethylene glycol
  misc_feature (7)..(8): n is 5-(N-benzylcarboxyamide)-2'-deoxyuridine
  misc_feature (11)..(11): n is 2'-O-methyl-adenosine
  misc_feature (16)..(16): n is 5-(N-benzylcarboxyamide)-2'-deoxyuridine
  misc_feature (17)..(17): n is 5-[N-(phenyl-2-ethyl)-carboxyamide]-2'-deoxyuridine
  misc_feature (18)..(18): n is 5-[N-(2-thiophene-methyl)carboxyamide]-2'-deoxyuridine
  misc_feature (20)..(20): n is 5-(N-benzylcarboxyamide)-2'-deoxyuridine
  misc_feature (21)..(21): n is 2'-O-methyl-adenosine
  misc_feature (24)..(24): n is 2'-O-methyl-guanosine
  misc_feature (25)..(26): n is hexaethylene glycol
  misc_feature (27)..(27): n is 1,3-bis-[5-hydroxy-pentylamido]-2-propanol
nnncngnnacncgcgnnnanngcnnnnt

SEQ ID NO: 277 - DNA, 29 bp, Artificial Sequence
  Synthetic
  misc_feature (1)..(2): n is 5-(N-benzylcarboxyamide)-2'-deoxyuridine
  misc_feature (3)..(3): n is 2'-O-methyl-adenosine
  misc_feature (5)..(5): n is hexaethylene glycol
  misc_feature (7)..(8): n is 5-(N-benzylcarboxyamide)-2'-deoxyuridine
  misc_feature (11)..(11): n is 2'-O-methyl-adenosine
  misc_feature (16)..(16): n is 5-(N-benzylcarboxyamide)-2'-deoxyuridine
  misc_feature (17)..(17): n is 5-[N-(phenyl-2-ethyl)-carboxyamide]-2'-deoxyuridine
  misc_feature (18)..(18): n is 5-[N-(2-thiophene-methyl)carboxyamide]-2'-deoxyuridine
  misc_feature (20)..(20): n is 5-(N-benzylcarboxyamide)-2'-deoxyuridine
  misc_feature (21)..(21): n is 2'-O-methyl-adenosine
  misc_feature (24)..(24): n is 2'-O-methyl-guanosine
  misc_feature (25)..(27): n is hexaethylene glycol
  misc_feature (28)..(28): n is 1,3-bis-[5-hydroxy-pentylamido]-2-propanol
nnncngnnacncgcgnnnanngcnnnnnt

SEQ ID NO: 278 - DNA, 24 bp, Artificial Sequence
  Synthetic
  misc_feature (1)..(2): n is 5-(N-benzylcarboxyamide)-2'-deoxyuridine
  misc_feature (3)..(3): n is 2'-O-methyl-adenosine
  misc_feature (5)..(5): n is hexaethylene glycol
  misc_feature (7)..(7): n is 5-(N-benzylcarboxyamide)-2'-O-methyl-uridine
  misc_feature (8)..(8): n is 5-(N-benzylcarboxyamide)-2'-deoxyuridine
  misc_feature (11)..(11): n is 2'-O-methyl-adenosine
  misc_feature (12)..(12): n is 2'-O-methyl-cytidine
  misc_feature (16)..(16): n is 5-(N-benzylcarboxyamide)-2'-deoxyuridine
  misc_feature (17)..(17): n is 5-[N-(phenyl-2-ethyl)-carboxyamide]-2'-deoxyuridine
  misc_feature (18)..(18): n is 5-(N-benzylcarboxyamide)-2'-O-methyl-uridine
  misc_feature (18)..(18): n is 5-[N-(2-thiophene-methyl)carboxyamide]-2'-deoxyuridine
  misc_feature (19)..(19): n is 2'-O-methyl-adenosine
  misc_feature (20)..(20): n is 5-(N-benzylcarboxyamide)-2'-deoxyuridine
  misc_feature (21)..(21): n is 2'-O-methyl-adenosine
  misc_feature (24)..(24): n is 2'-O-methyl-guanosine
nnncngnnacnngcgnnnnnngcn

SEQ ID NO: 279 - DNA, 24 bp, Artificial Sequence
  Synthetic
  misc_feature (1)..(2): n is 5-(N-benzylcarboxyamide)-2'-deoxyuridine
  misc_feature (3)..(3): n is 2'-O-methyl-adenosine
  misc_feature (5)..(5): n is hexaethylene glycol
  misc_feature (6)..(6): n is 2'-fluoro-2'-deoxy-guanosine
  misc_feature (7)..(7): n is 5-(N-benzylcarboxyamide)-2'-O-methyl-uridine
  misc_feature (8)..(8): n is 5-(N-benzylcarboxyamide)-2'-deoxyuridine
  misc_feature (11)..(11): n is 2'-O-methyl-adenosine
  misc_feature (12)..(12): n is 2'-O-methyl-cytidine
  misc_feature (16)..(16): n is 5-(N-benzylcarboxyamide)-2'-deoxyuridine
  misc_feature (17)..(17): n is 5-[N-(phenyl-2-ethyl)-carboxyamide]-2'-deoxyuridine
  misc_feature (18)..(18): n is 5-(N-benzylcarboxyamide)-2'-O-methyl-uridine
  misc_feature (19)..(19): n is 2'-O-methyl-adenosine
  misc_feature (20)..(20): n is 5-(N-benzylcarboxyamide)-2'-deoxyuridine
  misc_feature (21)..(21): n is 2'-O-methyl-adenosine
  misc_feature (24)..(24): n is 2'-O-methyl-guanosine
nnncnnnnacnngcgnnnnnngcn

SEQ ID NO: 280 - DNA, 24 bp, Artificial Sequence
  Synthetic
  misc_feature (1)..(2): n is 5-(N-benzylcarboxyamide)-2'-deoxyuridine
  misc_feature (3)..(3): n is 2'-O-methyl-adenosine
  misc_feature (5)..(5): n is hexaethylene glycol
  misc_feature (7)..(7): n is 5-(N-benzylcarboxyamide)-2'-O-methyl-uridine
  misc_feature (8)..(8): n is 5-(N-benzylcarboxyamide)-2'-deoxyuridine
  misc_feature (11)..(11): n is 2'-O-methyl-adenosine
  misc_feature (12)..(12): n is 2'-O-methyl-cytidine
  misc_feature (13)..(13): n is 2'-fluoro-2'-deoxy-guanosine
  misc_feature (16)..(16): n is 5-(N-benzylcarboxyamide)-2'-deoxyuridine
  misc_feature (17)..(17): n is 5-[N-(phenyl-2-ethyl)-carboxyamide]-2'-deoxyuridine
  misc_feature (18)..(18): n is 5-(N-benzylcarboxyamide)-2'-O-methyl-uridine
  misc_feature (19)..(19): n is 2'-O-methyl-adenosine
  misc_feature (20)..(20): n is 5-(N-benzylcarboxyamide)-2'-deoxyuridine
  misc_feature (21)..(21): n is 2'-O-methyl-adenosine
  misc_feature (24)..(24): n is 2'-O-methyl-guanosine
nnncngnnacnnncgnnnnnngcn

SEQ ID NO: 281 - DNA, 24 bp, Artificial Sequence
  Synthetic
  misc_feature (1)..(2): n is 5-(N-benzylcarboxyamide)-2'-deoxyuridine
  misc_feature (3)..(3): n is 2'-O-methyl-adenosine
  misc_feature (5)..(5): n is hexaethylene glycol
  misc_feature (7)..(7): n is 5-(N-benzylcarboxyamide)-2'-O-methyl-uridine
  misc_feature (8)..(8): n is 5-(N-benzylcarboxyamide)-2'-deoxyuridine
  misc_feature (11)..(11): n is 2'-O-methyl-adenosine
  misc_feature (12)..(12): n is 2'-O-methyl-cytidine
  misc_feature (15)..(15): n is 2'-fluoro-2'-deoxy-guanosine
  misc_feature (16)..(16): n is 5-(N-benzylcarboxyamide)-2'-deoxyuridine
  misc_feature (17)..(17): n is 5-[N-(phenyl-2-ethyl)-carboxyamide]-2'-deoxyuridine
  misc_feature (18)..(18): n is 5-(N-benzylcarboxyamide)-2'-O-methyl-uridine
  misc_feature (19)..(19): n is 2'-O-methyl-adenosine
  misc_feature (20)..(20): n is 5-(N-benzylcarboxyamide)-2'-deoxyuridine
  misc_feature (21)..(21): n is 2'-O-methyl-adenosine
  misc_feature (24)..(24): n is 2'-O-methyl-guanosine
nnncngnnacnngcnnnnnnngcn

SEQ ID NO: 282 - DNA, 24 bp, Artificial Sequence
  Synthetic
  misc_feature (1)..(2): n is 5-(N-benzylcarboxyamide)-2'-deoxyuridine
  misc_feature (3)..(3): n is 2'-O-methyl-adenosine
  misc_feature (5)..(5): n is hexaethylene glycol
  misc_feature (7)..(7): n is 5-(N-benzylcarboxyamide)-2'-O-methyl-uridine
  misc_feature (8)..(8): n is 5-(N-benzylcarboxyamide)-2'-deoxyuridine
  misc_feature (11)..(11): n is 2'-O-methyl-adenosine
  misc_feature (12)..(12): n is 2'-O-methyl-cytidine
  misc_feature (16)..(16): n is 5-(N-benzylcarboxyamide)-2'-deoxyuridine
  misc_feature (17)..(17): n is 5-[N-(phenyl-2-ethyl)-carboxyamide]-2'-deoxyuridine
  misc_feature (18)..(18): n is 5-(N-benzylcarboxyamide)-2'-O-methyl-uridine
  misc_feature (19)..(19): n is 2'-O-methyl-adenosine
  misc_feature (20)..(20): n is 5-(N-benzylcarboxyamide)-2'-deoxyuridine
  misc_feature (21)..(21): n is 2'-O-methyl-adenosine
  misc_feature (22)..(22): n is 2'-fluoro-2'-deoxy-guanosine
  misc_feature (24)..(24): n is 2'-O-methyl-guanosine
nnncngnnacnngcgnnnnnnncn

SEQ ID NO: 283 - DNA, 24 bp, Artificial Sequence
  Synthetic
  misc_feature (1)..(2): n is 5-(N-benzylcarboxyamide)-2'-deoxyuridine
  misc_feature (3)..(3): n is 2'-O-methyl-adenosine
  misc_feature (4)..(4): n is 2'-fluoro-2'-deoxycytidine
  misc_feature (5)..(5): n is hexaethylene glycol
  misc_feature (7)..(7): n is 5-(N-benzylcarboxyamide)-2'-O-methyl-uridine
  misc_feature (8)..(8): n is 5-(N-benzylcarboxyamide)-2'-deoxyuridine
  misc_feature (11)..(11): n is 2'-O-methyl-adenosine
  misc_feature (12)..(12): n is 2'-O-methyl-cytidine
  misc_feature (16)..(16): n is 5-(N-benzylcarboxyamide)-2'-deoxyuridine
  misc_feature (17)..(17): n is 5-[N-(phenyl-2-ethyl)-carboxyamide]-2'-deoxyuridine
  misc_feature (18)..(18): n is 5-(N-benzylcarboxyamide)-2'-O-methyl-uridine
  misc_feature (19)..(19): n is 2'-O-methyl-adenosine
  misc_feature (20)..(20): n is 5-(N-benzylcarboxyamide)-2'-deoxyuridine
  misc_feature (21)..(21): n is 2'-O-methyl-adenosine
  misc_feature (24)..(24): n si 2'-O-methyl-guanosine
nnnnngnnacnngcgnnnnnngcn

SEQ ID NO: 284 - DNA, 24 bp, Artificial Sequence
  Synthetic
  misc_feature (1)..(2): n is 5-(N-benzylcarboxyamide)-2'-deoxyuridine
  misc_feature (3)..(3): n is 2'-O-methyl-adenosine
  misc_feature (5)..(5): n is hexaethylene glycol
  misc_feature (7)..(7): n is 5-(N-benzylcarboxyamide)-2'-O-methyl-uridine
  misc_feature (8)..(8): n is 5-(N-benzylcarboxyamide)-2'-deoxyuridine
  misc_feature (11)..(11): n is 2'-O-methyl-adenosine
  misc_feature (12)..(12): n is 2'-O-methyl-cytidine
  misc_feature (16)..(16): n is 5-(N-benzylcarboxyamide)-2'-deoxyuridine
  misc_feature (17)..(17): n is 5-[N-(phenyl-2-ethyl)-carboxyamide]-2'-deoxyuridine
  misc_feature (18)..(18): n is 5-(N-benzylcarboxyamide)-2'-O-methyl-uridine
  misc_feature (19)..(19): n is 2'-O-methyl-adenosine
  misc_feature (20)..(20): n is 5-(N-benzylcarboxyamide)-2'-deoxyuridine
  misc_feature (21)..(21): n is 2'-O-methyl-adenosine
  misc_feature (23)..(23): n is 2'-fluoro-2'-deoxycytidine
  misc_feature (24)..(24): n is 2'-O-methyl-guanosine
nnncngnnacnngcgnnnnnngnn

SEQ ID NO: 285 - DNA, 24 bp, Artificial Sequence
  Synthetic
  misc_feature (1)..(2): n is 5-(N-benzylcarboxyamide)-2'-deoxyuridine
  misc_feature (3)..(3): n is 2'-O-methyl-adenosine
  misc_feature (5)..(5): n is hexaethylene glycol
  misc_feature (7)..(8): n is 5-(N-benzylcarboxyamide)-2'-deoxyuridine
  misc_feature (9)..(9): n is 2'-fluoro-2'-deoxyadenosine
  misc_feature (11)..(11): n is 2'-O-methyl-adenosine
  misc_feature (12)..(12): n is 2'-O-methyl-cytidine
  misc_feature (16)..(16): n is 5-(N-benzylcarboxyamide)-2'-deoxyuridine
  misc_feature (17)..(17): n is 5-[N-(phenyl-2-ethyl)-carboxyamide]-2'-deoxyuridine
  misc_feature (18)..(18): n is 5-(N-benzylcarboxyamide)-2'-O-methyl-uridine
  misc_feature (19)..(19): n is 2'-O-methyl-adenosine
  misc_feature (20)..(20): n is 5-(N-benzylcarboxyamide)-2'-deoxyuridine
  misc_feature (21)..(21): n is 2'-O-methyl-adenosine
  misc_feature (24)..(24): n is 2'-O-methyl-guanosine
nnncngnnncnngcgnnnnnngcn

SEQ ID NO: 286 - DNA, 24 bp, Artificial Sequence
  Synthetic
  misc_feature (1)..(1): n is 5-[N-(2-naphthylmethyl)carboxyamide]-2'-deoxyuridine
  misc_feature (2)..(2): n is 5-(N-benzylcarboxyamide)-2'-deoxyuridine
  misc_feature (3)..(3): n is 2'-O-methyl-adenosine
  misc_feature (5)..(5): n is hexaethylene glycol
  misc_feature (7)..(8): n is 5-(N-benzylcarboxyamide)-2'-deoxyuridine
  misc_feature (11)..(11): n is 2'-O-methyl-adenosine
  misc_feature (12)..(12): n is 2'-O-methyl-cytidine
  misc_feature (16)..(16): n is 5-(N-benzylcarboxyamide)-2'-deoxyuridine
  misc_feature (17)..(17): n is 5-[N-(phenyl-2-ethyl)-carboxyamide]-2'-deoxyuridine
  misc_feature (18)..(18): n is 5-(N-benzylcarboxyamide)-2'-O-methyl-uridine
  misc_feature (19)..(19): n is 2'-O-methyl-adenosine
  misc_feature (20)..(20): n is 5-(N-benzylcarboxyamide)-2'-deoxyuridine
  misc_feature (21)..(21): n is 2'-O-methyl-adenosine
  misc_feature (24)..(24): n is 2'-O-methyl-guanosine
nnncngnnacnngcgnnnnnngcn

SEQ ID NO: 287 - DNA, 24 bp, Artificial Sequence
  Synthetic
  misc_feature (1)..(1): n is 5-[N-(4-fluorobenzyl)carboxyamide]-2'-deoxyuridine
  misc_feature (2)..(2): n is 5-(N-benzylcarboxyamide)-2'-deoxyuridine
  misc_feature (3)..(3): n is 2'-O-methyl-adenosine
  misc_feature (5)..(5): n is hexaethylene glycol
  misc_feature (7)..(8): n is 5-(N-benzylcarboxyamide)-2'-deoxyuridine
  misc_feature (11)..(11): n is 2'-O-methyl-adenosine
  misc_feature (12)..(12): n is 2'-O-methyl-cytidine
  misc_feature (16)..(16): n is 5-(N-benzylcarboxyamide)-2'-deoxyuridine
  misc_feature (17)..(17): n is 5-[N-(phenyl-2-ethyl)-carboxyamide]-2'-deoxyuridine
  misc_feature (18)..(18): n is 5-(N-benzylcarboxyamide)-2'-O-methyl-uridine
  misc_feature (19)..(19): n is 2'-O-methyl-adenosine
  misc_feature (20)..(20): n is 5-(N-benzylcarboxyamide)-2'-deoxyuridine
  misc_feature (21)..(21): n is 2'-O-methyl-adenosine
  misc_feature (24)..(24): n is 2'-O-methyl-guanosine
nnncngnnacnngcgnnnnnngcn

SEQ ID NO: 288 - DNA, 24 bp, Artificial Sequence
  Synthetic
  misc_feature (1)..(1): n is 5-[N-(1-naphthyl-2-ethyl)carboxyamide]-2'-deoxyuridine
  misc_feature (2)..(2): n is 5-(N-benzylcarboxyamide)-2'-deoxyuridine
  misc_feature (3)..(3): n is 2'-O-methyl-adenosine
  misc_feature (5)..(5): n is hexaethylene glycol
  misc_feature (7)..(8): n is 5-(N-benzylcarboxyamide)-2'-deoxyuridine
  misc_feature (11)..(11): n is 2'-O-methyl-adenosine
  misc_feature (12)..(12): n is 2'-O-methyl-cytidine
  misc_feature (16)..(16): n is 5-(N-benzylcarboxyamide)-2'-deoxyuridine
  misc_feature (17)..(17): n is 5-[N-(phenyl-2-ethyl)-carboxyamide]-2'-deoxyuridine
  misc_feature (18)..(18): n is 5-(N-benzylcarboxyamide)-2'-O-methyl-uridine
  misc_feature (19)..(19): n is 2'-O-methyl-adenosine
  misc_feature (20)..(20): n is 5-(N-benzylcarboxyamide)-2'-deoxyuridine
  misc_feature (21)..(21): n is 2'-O-methyl-adenosine
  misc_feature (24)..(24): n is 2'-O-methyl-guanosine
nnncngnnacnngcgnnnnnngcn

SEQ ID NO: 289 - DNA, 24 bp, Artificial Sequence
  Synthetic
  misc_feature (1)..(1): n is 5-[N-(2-naphthyl-2-ethyl)carboxyamide]-2'-deoxyuridine
  misc_feature (2)..(2): n is 5-(N-benzylcarboxyamide)-2'-deoxyuridine
  misc_feature (3)..(3): n is 2'-O-methyl-adenosine
  misc_feature (5)..(5): n is hexaethylene glycol
  misc_feature (7)..(8): n is 5-(N-benzylcarboxyamide)-2'-deoxyuridine
  misc_feature (11)..(11): n is 2'-O-methyl-adenosine
  misc_feature (12)..(12): n is 2'-O-methyl-cytidine
  misc_feature (16)..(16): n is 5-(N-benzylcarboxyamide)-2'-deoxyuridine
  misc_feature (17)..(17): n is 5-[N-(phenyl-2-ethyl)-carboxyamide]-2'-deoxyuridine
  misc_feature (18)..(18): n is 5-(N-benzylcarboxyamide)-2'-O-methyl-uridine
  misc_feature (19)..(19): n is 2'-O-methyl-adenosine
  misc_feature (20)..(20): n is 5-(N-benzylcarboxyamide)-2'-deoxyuridine
  misc_feature (21)..(21): n is 2'-O-methyl-adenosine
  misc_feature (24)..(24): n is 2'-O-methyl-guanosine
nnncngnnacnngcgnnnnnngcn

SEQ ID NO: 290 - DNA, 24 bp, Artificial Sequence
  Synthetic
  misc_feature (1)..(1): n is 5-[N-(phenyl-3-propyl)-carboxyamide]-2'-deoxyuridine
  misc_feature (2)..(2): n is 5-(N-benzylcarboxyamide)-2'-deoxyuridine
  misc_feature (3)..(3): n is 2'-O-methyl-adenosine
  misc_feature (5)..(5): n is hexaethylene glycol
  misc_feature (7)..(8): n is 5-(N-benzylcarboxyamide)-2'-deoxyuridine
  misc_feature (11)..(11): n is 2'-O-methyl-adenosine
  misc_feature (12)..(12): n is 2'-O-methyl-cytidine
  misc_feature (16)..(16): n is 5-(N-benzylcarboxyamide)-2'-deoxyuridine
  misc_feature (17)..(17): n is 5-[N-(phenyl-2-ethyl)-carboxyamide]-2'-deoxyuridine
  misc_feature (18)..(18): n is 5-(N-benzylcarboxyamide)-2'-O-methyl-uridine
  misc_feature (19)..(19): n is 2'-O-methyl-adenosine
  misc_feature (20)..(20): n is 5-(N-benzylcarboxyamide)-2'-deoxyuridine
  misc_feature (21)..(21): n is 2'-O-methyl-adenosine
  misc_feature (24)..(24): n is 2'-O-methyl-guanosine
nnncngnnacnngcgnnnnnngcn

SEQ ID NO: 291 - DNA, 24 bp, Artificial Sequence
  Synthetic
  misc_feature (1)..(1): n is 5-[N-isobutyl-carboxyamide]-2'-deoxyuridine
  misc_feature (2)..(2): n is 5-(N-benzylcarboxyamide)-2'-deoxyuridine
  misc_feature (3)..(3): n is 2'-O-methyl-adenosine
  misc_feature (5)..(5): n is hexaethylene glycol
  misc_feature (7)..(8): n is 5-(N-benzylcarboxyamide)-2'-deoxyuridine
  misc_feature (11)..(11): n is 2'-O-methyl-adenosine
  misc_feature (12)..(12): n is 2'-O-methyl-cytidine
  misc_feature (16)..(16): n is 5-(N-benzylcarboxyamide)-2'-deoxyuridine
  misc_feature (17)..(17): n is 5-[N-(phenyl-2-ethyl)-carboxyamide]-2'-deoxyuridine
  misc_feature (18)..(18): n is 5-(N-benzylcarboxyamide)-2'-O-methyl-uridine
  misc_feature (19)..(19): n is 2'-O-methyl-adenosine
  misc_feature (20)..(20): n is 5-(N-benzylcarboxyamide)-2'-deoxyuridine
  misc_feature (21)..(21): n is 2'-O-methyl-adenosine
  misc_feature (24)..(24): n is 2'-O-methyl-guanosine
nnncngnnacnngcgnnnnnngcn

SEQ ID NO: 292 - DNA, 24 bp, Artificial Sequence
  Synthetic
  misc_feature (1)..(1): n is 5-(N-benzylcarboxyamide)-2'-deoxyuridine
  misc_feature (2)..(2): n is 5-[N-(3,4-methylenedioxyphenyl-methyl)carboxyamide]-2'-deoxyuridi ne
  misc_feature (3)..(3): n is 2'-O-methyl-adenosine
  misc_feature (5)..(5): n is hexaethylene glycol
  misc_feature (7)..(8): n is 5-(N-benzylcarboxyamide)-2'-deoxyuridine
  misc_feature (11)..(11): n is 2'-O-methyl-adenosine
  misc_feature (12)..(12): n is 2'-O-methyl-cytidine
  misc_feature (16)..(16): n is 5-(N-benzylcarboxyamide)-2'-deoxyuridine
  misc_feature (17)..(17): n is 5-[N-(phenyl-2-ethyl)-carboxyamide]-2'-deoxyuridine
  misc_feature (18)..(18): n is 5-(N-benzylcarboxyamide)-2'-O-methyl-uridine
  misc_feature (19)..(19): n is 2'-O-methyl-adenosine
  misc_feature (20)..(20): n is 5-(N-benzylcarboxyamide)-2'-deoxyuridine
  misc_feature (21)..(21): n is 2'-O-methyl-adenosine
  misc_feature (24)..(24): n is 2'-O-methyl-guanosine
nnncngnnacnngcgnnnnnngcn

SEQ ID NO: 293 - DNA, 24 bp, Artificial Sequence
  Synthetic
  misc_feature (2)..(2): n is 5-(N-benzylcarboxyamide)-2'-deoxyuridine
  misc_feature (3)..(3): n is 2'-O-methyl-adenosine
  misc_feature (5)..(5): n is hexaethylene glycol
  misc_feature (7)..(8): n is 5-(N-benzylcarboxyamide)-2'-deoxyuridine
  misc_feature (11)..(11): n is 2'-O-methyl-adenosine
  misc_feature (16)..(18): n is 5-(N-benzylcarboxyamide)-2'-deoxyuridine
  misc_feature (20)..(20): n is 5-(N-benzylcarboxyamide)-2'-deoxyuridine
  misc_feature (21)..(21): n is 2'-O-methyl-adenosine
  misc_feature (24)..(24): n is 2'-O-methyl-guanosine
tnncngnnacncgcgnnnanngcn

SEQ ID NO: 294 - DNA, 24 bp, Artificial Sequence
  Synthetic
  misc_feature (1)..(1): n is 5-(N-benzylcarboxyamide)-2'-deoxyuridine
  misc_feature (3)..(3): n is 2'-O-methyl-adenosine
  misc_feature (5)..(5): n is hexaethylene glycol
  misc_feature (7)..(8): n is 5-(N-benzylcarboxyamide)-2'-deoxyuridine
  misc_feature (11)..(11): n is 2'-O-methyl-adenosine
  misc_feature (16)..(18): n is 5-(N-benzylcarboxyamide)-2'-deoxyuridine
  misc_feature (20)..(20): n is 5-(N-benzylcarboxyamide)-2'-deoxyuridine
  misc_feature (21)..(21): n is 2'-O-methyl-adenosine
  misc_feature (24)..(24): n is 2'-O-methyl-guanosine
ntncngnnacncgcgnnnanngcn

SEQ ID NO: 295 - DNA, 24 bp, Artificial Sequence
  Synthetic
  misc_feature (1)..(2): n is 5-(N-benzylcarboxyamide)-2'-deoxyuridine
  misc_feature (3)..(3): n is 2'-O-methyl-adenosine
  misc_feature (5)..(5): n is hexaethylene glycol
  misc_feature (8)..(8): n is 5-(N-benzylcarboxyamide)-2'-deoxyuridine
  misc_feature (11)..(11): n is 2'-O-methyl-adenosine
  misc_feature (16)..(18): n is 5-(N-benzylcarboxyamide)-2'-deoxyuridine
  misc_feature (20)..(20): n is 5-(N-benzylcarboxyamide)-2'-deoxyuridine
  misc_feature (21)..(21): n is 2'-O-methyl-adenosine
  misc_feature (24)..(24): n is 2'-O-methyl-guanosine
nnncngtnacncgcgnnnanngcn

SEQ ID NO: 296 - DNA, 24 bp, Artificial Sequence
  Synthetic
  misc_feature (1)..(2): n is 5-(N-benzylcarboxyamide)-2'-deoxyuridine
  misc_feature (3)..(3): n is 2'-O-methyl-adenosine
  misc_feature (5)..(5): n is hexaethylene glycol
  misc_feature (7)..(8): n is 5-(N-benzylcarboxyamide)-2'-deoxyuridine
  misc_feature (9)..(9): n is 2'-deoxyadenosine-3'-phosphorothioate
  misc_feature (11)..(11): n is 2'-O-methyl-adenosine
  misc_feature (12)..(12): n is 2'-O-methyl-cytidine
  misc_feature (16)..(16): n is 5-(N-benzylcarboxyamide)-2'-deoxyuridine
  misc_feature (17)..(17): n is 5-[N-(phenyl-2-ethyl)-carboxyamide]-2'-deoxyuridine
  misc_feature (18)..(18): n is 5-(N-benzylcarboxyamide)-2'-O-methyl-uridine
  misc_feature (19)..(19): n is 2'-O-methyl-adenosine
  misc_feature (20)..(20): n is 5-(N-benzylcarboxyamide)-2'-deoxyuridine
  misc_feature (21)..(21): n is 2'-O-methyl-adenosine
  misc_feature (24)..(24): n is 2'-O-methyl-guanosine
nnncngnnncnngcgnnnnnngcn

SEQ ID NO: 297 - DNA, 24 bp, Artificial Sequence
  Synthetic
  misc_feature (1)..(2): n is 5-(N-benzylcarboxyamide)-2'-deoxyuridine
  misc_feature (3)..(3): n is 2'-O-methyl-adenosine
  misc_feature (5)..(5): n is hexaethylene glycol
  misc_feature (7)..(7): n is 5-(N-benzylcarboxyamide)-2'-O-methyl-uridine
  misc_feature (8)..(8): n is 5-(N-benzylcarboxyamide)-2'-deoxyuridine
  misc_feature (9)..(9): n is 2'-deoxyadenosine-3'-phosphorothioate
  misc_feature (11)..(11): n is 2'-O-methyl-adenosine
  misc_feature (12)..(12): n is 2'-O-methyl-cytidine
  misc_feature (16)..(16): n is 5-(N-benzylcarboxyamide)-2'-deoxyuridine
  misc_feature (17)..(17): n is 5-[N-(phenyl-2-ethyl)-carboxyamide]-2'-deoxyuridine
  misc_feature (18)..(18): n is 5-(N-benzylcarboxyamide)-2'-O-methyl-uridine
  misc_feature (19)..(19): n is 2'-O-methyl-adenosine
  misc_feature (20)..(20): n is 5-(N-benzylcarboxyamide)-2'-deoxyuridine
  misc_feature (21)..(21): n is 2'-O-methyl-adenosine
  misc_feature (24)..(24): n is 2'-O-methyl-guanosine
nnncngnnncnngcgnnnnnngcn

SEQ ID NO: 298 - DNA, 24 bp, Artificial Sequence
  Synthetic
  misc_feature (1)..(2): n is 5-(N-benzylcarboxyamide)-2'-deoxyuridine
  misc_feature (3)..(3): n is 2'-O-methyl-adenosine
  misc_feature (5)..(5): n is hexaethylene glycol
  misc_feature (7)..(8): n is 5-(N-benzylcarboxyamide)-2'-deoxyuridine
  misc_feature (11)..(11): n is 2'-O-methyl-adenosine
  misc_feature (12)..(12): n is 2'-O-methyl-cytidine
  misc_feature (15)..(15): n is 2'-deoxyguanosine-3'-phosphorothioate
  misc_feature (16)..(16): n is 5-(N-benzylcarboxyamide)-2'-deoxyuridine
  misc_feature (17)..(17): n is 5-[N-(phenyl-2-ethyl)-carboxyamide]-2'-deoxyuridine
  misc_feature (18)..(18): n is 5-(N-benzylcarboxyamide)-2'-O-methyl-uridine
  misc_feature (19)..(19): n is 2'-O-methyl-adenosine
  misc_feature (20)..(20): n is 5-(N-benzylcarboxyamide)-2'-deoxyuridine
  misc_feature (21)..(21): n is 2'-O-methyl-adenosine
  misc_feature (24)..(24): n is 2'-O-methyl-guanosine
nnncngnnacnngcnnnnnnngcn

SEQ ID NO: 299 - DNA, 24 bp, Artificial Sequence
  Synthetic
  misc_feature (1)..(2): n is 5-(N-benzylcarboxyamide)-2'-deoxyuridine
  misc_feature (3)..(3): n is 2'-O-methyl-adenosine
  misc_feature (5)..(5): n is hexaethylene glycol
  misc_feature (7)..(7): n is 5-(N-benzylcarboxyamide)-2'-O-methyl-uridine
  misc_feature (8)..(8): n is 5-(N-benzylcarboxyamide)-2'-deoxyuridine
  misc_feature (11)..(11): n is 2'-O-methyl-adenosine
  misc_feature (12)..(12): n is 2'-O-methyl-cytidine
  misc_feature (15)..(15): n is 2'-deoxyguanosine-3'-phosphorothioate
  misc_feature (16)..(16): n is 5-(N-benzylcarboxyamide)-2'-deoxyuridine
  misc_feature (17)..(17): n is 5-[N-(phenyl-2-ethyl)-carboxyamide]-2'-deoxyuridine
  misc_feature (18)..(18): n is 5-(N-benzylcarboxyamide)-2'-O-methyl-uridine
  misc_feature (19)..(19): n is 2'-O-methyl-adenosine
  misc_feature (20)..(20): n is 5-(N-benzylcarboxyamide)-2'-deoxyuridine
  misc_feature (21)..(21): n is 2'-O-methyl-adenosine
  misc_feature (24)..(24): n is 2'-O-methyl-guanosine
nnncngnnacnngcnnnnnnngcn

SEQ ID NO: 300 - DNA, 24 bp, Artificial Sequence
  Synthetic
  misc_feature (1)..(2): n is 5-(N-benzylcarboxyamide)-2'-deoxyuridine
  misc_feature (3)..(3): n is 2'-O-methyl-adenosine
  misc_feature (5)..(5): n is hexaethylene glycol
  misc_feature (7)..(8): n is 5-(N-benzylcarboxyamide)-2'-deoxyuridine
  misc_feature (9)..(9): n is 2'-deoxyadenosine-3'-phosphorothioate
  misc_feature (11)..(11): n is 2'-O-methyl-adenosine
  misc_feature (12)..(12): n is 2'-O-methyl-cytidine
  misc_feature (15)..(15): n is 2'-deoxyguanosine-3'-phosphorothioate
  misc_feature (16)..(16): n is 5-(N-benzylcarboxyamide)-2'-deoxyuridine
  misc_feature (17)..(17): n is 5-[N-(phenyl-2-ethyl)-carboxyamide]-2'-deoxyuridine
  misc_feature (18)..(18): n is 5-(N-benzylcarboxyamide)-2'-O-methyl-uridine
  misc_feature (19)..(19): n is 2'-O-methyl-adenosine
  misc_feature (20)..(20): n is 5-(N-benzylcarboxyamide)-2'-deoxyuridine
  misc_feature (21)..(21): n is 2'-O-methyl-adenosine
  misc_feature (24)..(24): n is 2'-O-methyl-guanosine
nnncngnnncnngcnnnnnnngcn

SEQ ID NO: 301 - DNA, 24 bp, Artificial Sequence
  Synthetic
  misc_feature (1)..(2): n is 5-(N-benzylcarboxyamide)-2'-deoxyuridine
  misc_feature (3)..(3): n is 2'-O-methyl-adenosine
  misc_feature (5)..(5): n is hexaethylene glycol
  misc_feature (7)..(7): n is 5-(N-benzylcarboxyamide)-2'-O-methyl-uridine
  misc_feature (8)..(8): n is 5-(N-benzylcarboxyamide)-2'-deoxyuridine
  misc_feature (9)..(9): n is 2'-deoxyadenosine-3'-phosphorothioate
  misc_feature (11)..(11): n is 2'-O-methyl-adenosine
  misc_feature (12)..(12): n is 2'-O-methyl-cytidine
  misc_feature (15)..(15): n is 2'-deoxyguanosine-3'-phosphorothioate
  misc_feature (16)..(16): n is 5-(N-benzylcarboxyamide)-2'-deoxyuridine
  misc_feature (17)..(17): n is 5-[N-(phenyl-2-ethyl)-carboxyamide]-2'-deoxyuridine
  misc_feature (18)..(18): n is 5-(N-benzylcarboxyamide)-2'-O-methyl-uridine
  misc_feature (19)..(19): n is 2'-O-methyl-adenosine
  misc_feature (20)..(20): n is 5-(N-benzylcarboxyamide)-2'-deoxyuridine
  misc_feature (21)..(21): n is 2'-O-methyl-adenosine
  misc_feature (24)..(24): n is 2'-O-methyl-guanosine
nnncngnnncnngcnnnnnnngcn

SEQ ID NO: 302 - DNA, 24 bp, Artificial Sequence
  Synthetic
  misc_feature (1)..(1): n is 5-[N-(4-fluorobenzyl)carboxyamide]-2'-deoxyuridine
  misc_feature (2)..(2): n is 5-(N-benzylcarboxyamide)-2'-deoxyuridine
  misc_feature (3)..(3): n is 2'-O-methyl-adenosine
  misc_feature (5)..(5): n is hexaethylene glycol
  misc_feature (7)..(7): n is 5-(N-benzylcarboxyamide)-2'-O-methyl-uridine
  misc_feature (8)..(8): n is 5-(N-benzylcarboxyamide)-2'-deoxyuridine
  misc_feature (11)..(11): n is 2'-O-methyl-adenosine
  misc_feature (12)..(12): n is 2'-O-methyl-cytidine
  misc_feature (16)..(17): n is 5-(N-benzylcarboxyamide)-2'-deoxyuridine
  misc_feature (18)..(18): n is 5-(N-benzylcarboxyamide)-2'-O-methyl-uridine
  misc_feature (19)..(19): n is 2'-O-methyl-adenosine
  misc_feature (20)..(20): n is 5-(N-benzylcarboxyamide)-2'-deoxyuridine
  misc_feature (21)..(21): n is 2'-O-methyl-adenosine
  misc_feature (24)..(24): n is 2'-O-methyl-guanosine
nnncngnnacnngcgnnnnnngcn

SEQ ID NO: 303 - DNA, 24 bp, Artificial Sequence
  Synthetic
  misc_feature (1)..(1): n is 5-(N-benzylcarboxyamide)-2'-deoxyuridine
  misc_feature (2)..(2): n is 5-[N-(3,4-methylenedioxyphenyl-methyl)carboxyamide]-2'-deoxyuridi ne
  misc_feature (3)..(3): n is 2'-O-methyl-adenosine
  misc_feature (5)..(5): n is hexaethylene glycol
  misc_feature (7)..(7): n is 5-(N-benzylcarboxyamide)-2'-O-methyl-uridine
  misc_feature (8)..(8): n is 5-(N-benzylcarboxyamide)-2'-deoxyuridine
  misc_feature (11)..(11): n is 2'-O-methyl-adenosine
  misc_feature (12)..(12): n is 2'-O-methyl-cytidine
  misc_feature (16)..(17): n is 5-(N-benzylcarboxyamide)-2'-deoxyuridine
  misc_feature (18)..(18): n is 5-(N-benzylcarboxyamide)-2'-O-methyl-uridine
  misc_feature (19)..(19): n is 2'-O-methyl-adenosine
  misc_feature (20)..(20): n is 5-(N-benzylcarboxyamide)-2'-deoxyuridine
  misc_feature (21)..(21): n is 2'-O-methyl-adenosine
  misc_feature (24)..(24): n is 2'-O-methyl-guanosine
nnncngnnacnngcgnnnnnngcn

SEQ ID NO: 304 - DNA, 24 bp, Artificial Sequence
  Synthetic
  misc_feature (1)..(1): n is 5-[N-(4-fluorobenzyl)carboxyamide]-2'-deoxyuridine
  misc_feature (2)..(2): n is 5-[N-(3,4-methylenedioxyphenyl-methyl)carboxyamide]-2'-deoxyuridi ne
  misc_feature (3)..(3): n is 2'-O-methyl-adenosine
  misc_feature (5)..(5): n is hexaethylene glycol
  misc_feature (7)..(7): n is 5-(N-benzylcarboxyamide)-2'-O-methyl-uridine
  misc_feature (8)..(8): n is 5-(N-benzylcarboxyamide)-2'-deoxyuridine
  misc_feature (11)..(11): n is 2'-O-methyl-adenosine
  misc_feature (12)..(12): n is 2'-O-methyl-cytidine
  misc_feature (16)..(17): n is 5-(N-benzylcarboxyamide)-2'-deoxyuridine
  misc_feature (18)..(18): n is 5-(N-benzylcarboxyamide)-2'-O-methyl-uridine
  misc_feature (19)..(19): n is 2'-O-methyl-adenosine
  misc_feature (20)..(20): n is 5-(N-benzylcarboxyamide)-2'-deoxyuridine
  misc_feature (21)..(21): n is 2'-O-methyl-adenosine
  misc_feature (24)..(24): n is 2'-O-methyl-guanosine
nnncngnnacnngcgnnnnnngcn

SEQ ID NO: 305 - DNA, 24 bp, Artificial Sequence
  Synthetic
  misc_feature (1)..(1): n is 5-[N-(4-fluorobenzyl)carboxyamide]-2'-deoxyuridine
  misc_feature (2)..(2): n is 5-(N-benzylcarboxyamide)-2'-deoxyuridine
  misc_feature (3)..(3): n is 2'-O-methyl-adenosine
  misc_feature (5)..(5): n is hexaethylene glycol
  misc_feature (7)..(7): n is 5-(N-benzylcarboxyamide)-2'-O-methyl-uridine
  misc_feature (8)..(8): n is 5-(N-benzylcarboxyamide)-2'-deoxyuridine
  misc_feature (11)..(11): n is 1,3-propane diol
  misc_feature (12)..(12): n is 2'-O-methyl-cytidine
  misc_feature (16)..(17): n is 5-(N-benzylcarboxyamide)-2'-deoxyuridine
  misc_feature (18)..(18): n is 5-(N-benzylcarboxyamide)-2'-O-methyl-uridine
  misc_feature (19)..(19): n is 2'-O-methyl-adenosine
  misc_feature (20)..(20): n is 5-(N-benzylcarboxyamide)-2'-deoxyuridine
  misc_feature (21)..(21): n is 2'-O-methyl-adenosine
  misc_feature (24)..(24): n is 2'-O-methyl-guanosine
nnncngnnacnngcgnnnnnngcn

SEQ ID NO: 306 - DNA, 24 bp, Artificial Sequence
  Synthetic
  misc_feature (1)..(1): n is 5-(N-benzylcarboxyamide)-2'-deoxyuridine
  misc_feature (2)..(2): n is 5-[N-(3,4-methylenedioxyphenyl-methyl)carboxyamide]-2'-deoxyuridi ne
  misc_feature (3)..(3): n is 2'-O-methyl-adenosine
  misc_feature (5)..(5): n is hexaethylene glycol
  misc_feature (7)..(7): n is 5-(N-benzylcarboxyamide)-2'-O-methyl-uridine
  misc_feature (8)..(8): n is 5-(N-benzylcarboxyamide)-2'-deoxyuridine
  misc_feature (11)..(11): n is 1,3-propane diol
  misc_feature (12)..(12): n is 2'-O-methyl-cytidine
  misc_feature (16)..(17): n is 5-(N-benzylcarboxyamide)-2'-deoxyuridine
  misc_feature (18)..(18): n is 5-(N-benzylcarboxyamide)-2'-O-methyl-uridine
  misc_feature (19)..(19): n is 2'-O-methyl-adenosine
  misc_feature (20)..(20): n is 5-(N-benzylcarboxyamide)-2'-deoxyuridine
  misc_feature (21)..(21): n is 2'-O-methyl-adenosine
  misc_feature (24)..(24): n is 2'-O-methyl-guanosine
nnncngnnacnngcgnnnnnngcn

SEQ ID NO: 307 - DNA, 24 bp, Artificial Sequence
  Synthetic
  misc_feature (1)..(1): n is 5-[N-(4-fluorobenzyl)carboxyamide]-2'-deoxyuridine
  misc_feature (2)..(2): n is 5-[N-(3,4-methylenedioxyphenyl-methyl)carboxyamide]-2'-deoxyuridi ne
  misc_feature (3)..(3): n is 2'-O-methyl-adenosine
  misc_feature (5)..(5): n is hexaethylene glycol
  misc_feature (7)..(7): n is 5-(N-benzylcarboxyamide)-2'-O-methyl-uridine
  misc_feature (8)..(8): n is 5-(N-benzylcarboxyamide)-2'-deoxyuridine
  misc_feature (11)..(11): n is 1,3-propane diol
  misc_feature (12)..(12): n is 2'-O-methyl-cytidine
  misc_feature (16)..(17): n is 5-(N-benzylcarboxyamide)-2'-deoxyuridine
  misc_feature (18)..(18): n is 5-(N-benzylcarboxyamide)-2'-O-methyl-uridine
  misc_feature (19)..(19): n is 2'-O-methyl-adenosine
  misc_feature (20)..(20): n is 5-(N-benzylcarboxyamide)-2'-deoxyuridine
  misc_feature (21)..(21): n is 2'-O-methyl-adenosine
  misc_feature (24)..(24): n is 2'-O-methyl-guanosine
nnncngnnacnngcgnnnnnngcn

SEQ ID NO: 308 - DNA, 24 bp, Artificial Sequence
  Synthetic
  misc_feature (1)..(1): n is 5-[N-(4-fluorobenzyl)carboxyamide]-2'-deoxyuridine
  misc_feature (2)..(2): n is 5-(N-benzylcarboxyamide)-2'-deoxyuridine
  misc_feature (3)..(3): n is 2'-O-methyl-adenosine
  misc_feature (5)..(5): n is hexaethylene glycol
  misc_feature (7)..(7): n is 5-(N-benzylcarboxyamide)-2'-O-methyl-uridine
  misc_feature (8)..(8): n is 5-(N-benzylcarboxyamide)-2'-deoxyuridine
  misc_feature (11)..(11): n is 2'-O-methyl-adenosine
  misc_feature (12)..(12): n is 2'-O-methyl-cytidine
  misc_feature (16)..(16): n is 5-(N-benzylcarboxyamide)-2'-deoxyuridine
  misc_feature (17)..(17): n is 5-[N-(phenyl-2-ethyl)-carboxyamide]-2'-deoxyuridine
  misc_feature (18)..(18): n is 5-(N-benzylcarboxyamide)-2'-O-methyl-uridine
  misc_feature (19)..(19): n is 2'-O-methyl-adenosine
  misc_feature (20)..(20): n is 5-(N-benzylcarboxyamide)-2'-deoxyuridine
  misc_feature (21)..(21): n is 2'-O-methyl-adenosine
  misc_feature (24)..(24): n is 2'-O-methyl-guanosine
nnncngnnacnngcgnnnnnngcn

SEQ ID NO: 309 - DNA, 24 bp, Artificial Sequence
  Synthetic
  misc_feature (1)..(1): n is 5-(N-benzylcarboxyamide)-2'-deoxyuridine
  misc_feature (2)..(2): n is 5-[N-(3,4-methylenedioxyphenyl-methyl)carboxyamide]-2'-deoxyuridi ne
  misc_feature (3)..(3): n is 2'-O-methyl-adenosine
  misc_feature (5)..(5): n is hexaethylene glycol
  misc_feature (7)..(7): n is 5-(N-benzylcarboxyamide)-2'-O-methyl-uridine
  misc_feature (8)..(8): n is 5-(N-benzylcarboxyamide)-2'-deoxyuridine
  misc_feature (11)..(11): n is 2'-O-methyl-adenosine
  misc_feature (12)..(12): n is 2'-O-methyl-cytidine
  misc_feature (16)..(16): n is 5-(N-benzylcarboxyamide)-2'-deoxyuridine
  misc_feature (17)..(17): n is 5-[N-(phenyl-2-ethyl)-carboxyamide]-2'-deoxyuridine
  misc_feature (18)..(18): n is 5-(N-benzylcarboxyamide)-2'-O-methyl-uridine
  misc_feature (19)..(19): n is 2'-O-methyl-adenosine
  misc_feature (20)..(20): n is 5-(N-benzylcarboxyamide)-2'-deoxyuridine
  misc_feature (21)..(21): n is 2'-O-methyl-adenosine
  misc_feature (24)..(24): n is 2'-O-methyl-guanosine
nnncngnnacnngcgnnnnnngcn

SEQ ID NO: 310 - DNA, 24 bp, Artificial Sequence
  Synthetic
  misc_feature (1)..(1): n is 5-[N-(4-fluorobenzyl)carboxyamide]-2'-deoxyuridine
  misc_feature (2)..(2): n is 5-[N-(3,4-methylenedioxyphenyl-methyl)carboxyamide]-2'-deoxyuridi ne
  misc_feature (3)..(3): n is 2'-O-methyl-adenosine
  misc_feature (5)..(5): n is hexaethylene glycol
  misc_feature (7)..(7): n is 5-(N-benzylcarboxyamide)-2'-O-methyl-uridine
  misc_feature (8)..(8): n is 5-(N-benzylcarboxyamide)-2'-deoxyuridine
  misc_feature (11)..(11): n is 2'-O-methyl-adenosine
  misc_feature (12)..(12): n is 2'-O-methyl-cytidine
  misc_feature (16)..(16): n is 5-(N-benzylcarboxyamide)-2'-deoxyuridine
  misc_feature (17)..(17): n is 5-[N-(phenyl-2-ethyl)-carboxyamide]-2'-deoxyuridine
  misc_feature (18)..(18): n is 5-(N-benzylcarboxyamide)-2'-O-methyl-uridine
  misc_feature (19)..(19): n is 2'-O-methyl-adenosine
  misc_feature (20)..(20): n is 5-(N-benzylcarboxyamide)-2'-deoxyuridine
  misc_feature (21)..(21): n is 2'-O-methyl-adenosine
  misc_feature (24)..(24): n is 2'-O-methyl-guanosine
nnncngnnacnngcgnnnnnngcn

SEQ ID NO: 311 - DNA, 24 bp, Artificial Sequence
  Synthetic
  misc_feature (1)..(1): n is 5-[N-(4-fluorobenzyl)carboxyamide]-2'-deoxyuridine
  misc_feature (2)..(2): n is 5-(N-benzylcarboxyamide)-2'-deoxyuridine
  misc_feature (3)..(3): n is 2'-O-methyl-adenosine
  misc_feature (5)..(5): n is hexaethylene glycol
  misc_feature (7)..(7): n is 5-(N-benzylcarboxyamide)-2'-O-methyl-uridine
  misc_feature (8)..(8): n is 5-(N-benzylcarboxyamide)-2'-deoxyuridine
  misc_feature (11)..(11): n is 1,3-propane diol
  misc_feature (12)..(12): n is 2'-O-methyl-cytidine
  misc_feature (16)..(16): n is 5-(N-benzylcarboxyamide)-2'-deoxyuridine
  misc_feature (17)..(17): n is 5-[N-(phenyl-2-ethyl)-carboxyamide]-2'-deoxyuridine
  misc_feature (18)..(18): n is 5-(N-benzylcarboxyamide)-2'-O-methyl-uridine
  misc_feature (19)..(19): n is 2'-O-methyl-adenosine
  misc_feature (20)..(20): n is 5-(N-benzylcarboxyamide)-2'-deoxyuridine
  misc_feature (21)..(21): n is 2'-O-methyl-adenosine
  misc_feature (24)..(24): n is 2'-O-methyl-guanosine
nnncngnnacnngcgnnnnnngcn

SEQ ID NO: 312 - DNA, 24 bp, Artificial Sequence
  Synthetic
  misc_feature (1)..(1): n is 5-(N-benzylcarboxyamide)-2'-deoxyuridine
  misc_feature (2)..(2): n is 5-[N-(3,4-methylenedioxyphenyl-methyl)carboxyamide]-2'-deoxyuridi ne
  misc_feature (3)..(3): n is 2'-O-methyl-adenosine
  misc_feature (5)..(5): n is hexaethylene glycol
  misc_feature (7)..(7): n is 5-(N-benzylcarboxyamide)-2'-O-methyl-uridine
  misc_feature (8)..(8): n is 5-(N-benzylcarboxyamide)-2'-deoxyuridine
  misc_feature (11)..(11): n is 1,3-propane diol
  misc_feature (12)..(12): n is 2'-O-methyl-cytidine
  misc_feature (16)..(16): n is 5-(N-benzylcarboxyamide)-2'-deoxyuridine
  misc_feature (17)..(17): n is 5-[N-(phenyl-2-ethyl)-carboxyamide]-2'-deoxyuridine
  misc_feature (18)..(18): n is 5-(N-benzylcarboxyamide)-2'-O-methyl-uridine
  misc_feature (19)..(19): n is 2'-O-methyl-adenosine
  misc_feature (20)..(20): n is 5-(N-benzylcarboxyamide)-2'-deoxyuridine
  misc_feature (21)..(21): n is 2'-O-methyl-adenosine
  misc_feature (24)..(24): n is 2'-O-methyl-guanosine
nnncngnnacnngcgnnnnnngcn

SEQ ID NO: 313 - DNA, 24 bp, Artificial Sequence
  Synthetic
  misc_feature (1)..(1): n is 5-[N-(4-fluorobenzyl)carboxyamide]-2'-deoxyuridine
  misc_feature (2)..(2): n is 5-[N-(3,4-methylenedioxyphenyl-methyl)carboxyamide]-2'-deoxyuridi ne
  misc_feature (3)..(3): n is 2'-O-methyl-adenosine
  misc_feature (5)..(5): n is hexaethylene glycol
  misc_feature (7)..(7): n is 5-(N-benzylcarboxyamide)-2'-O-methyl-uridine
  misc_feature (8)..(8): n is 5-(N-benzylcarboxyamide)-2'-deoxyuridine
  misc_feature (11)..(11): n is 1,3-propane diol
  misc_feature (12)..(12): n is 2'-O-methyl-cytidine
  misc_feature (16)..(16): n is 5-(N-benzylcarboxyamide)-2'-deoxyuridine
  misc_feature (17)..(17): n is 5-[N-(phenyl-2-ethyl)-carboxyamide]-2'-deoxyuridine
  misc_feature (18)..(18): n is 5-(N-benzylcarboxyamide)-2'-O-methyl-uridine
  misc_feature (19)..(19): n is 2'-O-methyl-adenosine
  misc_feature (20)..(20): n is 5-(N-benzylcarboxyamide)-2'-deoxyuridine
  misc_feature (21)..(21): n is 2'-O-methyl-adenosine
  misc_feature (24)..(24): n is 2'-O-methyl-guanosine
nnncngnnacnngcgnnnnnngcn

SEQ ID NO: 314 - DNA, 24 bp, Artificial Sequence
  Synthetic
  misc_feature (1)..(2): n is 5-(N-benzylcarboxyamide)-2'-deoxyuridine
  misc_feature (3)..(3): n is 2'-O-methyl-adenosine
  misc_feature (5)..(5): n is hexaethylene glycol
  misc_feature (7)..(8): n is 5-(N-benzylcarboxyamide)-2'-deoxyuridine
  misc_feature (9)..(9): n is 2'-deoxyadenosine-3'-phosphorothioate
  misc_feature (11)..(11): n is 2'-O-methyl-adenosine
  misc_feature (12)..(12): n is 2'-O-methyl-cytidine
  misc_feature (15)..(15): n is 2'-deoxyguanosine-3'-phosphorothioate
  misc_feature (16)..(17): n is 5-(N-benzylcarboxyamide)-2'-deoxyuridine
  misc_feature (18)..(18): n is 5-(N-benzylcarboxyamide)-2'-O-methyl-uridine
  misc_feature (19)..(19): n is 2'-O-methyl-adenosine
  misc_feature (20)..(20): n is 5-(N-benzylcarboxyamide)-2'-deoxyuridine
  misc_feature (21)..(21): n is 2'-O-methyl-adenosine
  misc_feature (24)..(24): n is 2'-O-methyl-guanosine
nnncngnnncnngcnnnnnnngcn

SEQ ID NO: 315 - DNA, 24 bp, Artificial Sequence
  Synthetic
  misc_feature (1)..(2): n is 5-(N-benzylcarboxyamide)-2'-deoxyuridine
  misc_feature (3)..(3): n is 2'-O-methyl-adenosine
  misc_feature (5)..(5): n is hexaethylene glycol
  misc_feature (7)..(7): n is 5-(N-benzylcarboxyamide)-2'-O-methyl-uridine
  misc_feature (8)..(8): n is 5-(N-benzylcarboxyamide)-2'-deoxyuridine
  misc_feature (9)..(9): n is 2'-deoxyadenosine-3'-phosphorothioate
  misc_feature (11)..(11): n is 2'-O-methyl-adenosine
  misc_feature (12)..(12): n is 2'-O-methyl-cytidine
  misc_feature (15)..(15): n is 2'-deoxyguanosine-3'-phosphorothioate
  misc_feature (16)..(17): n is 5-(N-benzylcarboxyamide)-2'-deoxyuridine
  misc_feature (18)..(18): n is 5-(N-benzylcarboxyamide)-2'-O-methyl-uridine
  misc_feature (19)..(19): n is 2'-O-methyl-adenosine
  misc_feature (20)..(20): n is 5-(N-benzylcarboxyamide)-2'-deoxyuridine
  misc_feature (21)..(21): n is 2'-O-methyl-adenosine
  misc_feature (24)..(24): n is 2'-O-methyl-guanosine
nnncngnnncnngcnnnnnnngcn

SEQ ID NO: 316 - DNA, 24 bp, Artificial Sequence
  Synthetic
  misc_feature (1)..(2): n is 5-(N-benzylcarboxyamide)-2'-deoxyuridine
  misc_feature (3)..(3): n is 2'-O-methyl-adenosine
  misc_feature (5)..(5): n is hexaethylene glycol
  misc_feature (7)..(7): n is 5-(N-benzylcarboxyamide)-2'-O-methyl-uridine
  misc_feature (8)..(8): n is 5-(N-benzylcarboxyamide)-2'-deoxyuridine
  misc_feature (9)..(9): n is 2'-deoxyadenosine-3'-phosphorothioate
  misc_feature (11)..(11): n is 1,3-propane diol
  misc_feature (12)..(12): n is 2'-O-methyl-cytidine
  misc_feature (15)..(15): n is 2'-deoxyguanosine-3'-phosphorothioate
  misc_feature (16)..(16): n is 5-(N-benzylcarboxyamide)-2'-deoxyuridine
  misc_feature (17)..(17): n is 5-[N-(phenyl-2-ethyl)-carboxyamide]-2'-deoxyuridine
  misc_feature (18)..(18): n is 5-(N-benzylcarboxyamide)-2'-O-methyl-uridine
  misc_feature (19)..(19): n is 2'-O-methyl-adenosine
  misc_feature (20)..(20): n is 5-(N-benzylcarboxyamide)-2'-deoxyuridine
  misc_feature (21)..(21): n is 2'-O-methyl-adenosine
  misc_feature (24)..(24): n is 2'-O-methyl-guanosine
nnncngnnncnngcnnnnnnngcn

SEQ ID NO: 317 - DNA, 24 bp, Artificial Sequence
  Synthetic
  misc_feature (1)..(2): n is 5-(N-benzylcarboxyamide)-2'-deoxyuridine
  misc_feature (3)..(3): n is 2'-O-methyl-adenosine
  misc_feature (5)..(5): n is hexaethylene glycol
  misc_feature (7)..(8): n is 5-(N-benzylcarboxyamide)-2'-deoxyuridine
  misc_feature (9)..(9): n is 2'-deoxyadenosine-3'-phosphorothioate
  misc_feature (11)..(11): n is 1,3-propane diol
  misc_feature (12)..(12): n is 2'-O-methyl-cytidine
  misc_feature (15)..(15): n is 2'-deoxyguanosine-3'-phosphorothioate
  misc_feature (16)..(17): n is 5-(N-benzylcarboxyamide)-2'-deoxyuridine
  misc_feature (18)..(18): n is 5-(N-benzylcarboxyamide)-2'-O-methyl-uridine
  misc_feature (19)..(19): n is 2'-O-methyl-adenosine
  misc_feature (20)..(20): n is 5-(N-benzylcarboxyamide)-2'-deoxyuridine
  misc_feature (21)..(21): n is 2'-O-methyl-adenosine
  misc_feature (24)..(24): n is 2'-O-methyl-guanosine
nnncngnnncnngcnnnnnnngcn

SEQ ID NO: 318 - DNA, 24 bp, Artificial Sequence
  Synthetic
  misc_feature (1)..(2): n is 5-(N-benzylcarboxyamide)-2'-deoxyuridine
  misc_feature (3)..(3): n is 2'-O-methyl-adenosine
  misc_feature (5)..(5): n is hexaethylene glycol
  misc_feature (7)..(7): n is 5-(N-benzylcarboxyamide)-2'-O-methyl-uridine
  misc_feature (8)..(8): n is 5-(N-benzylcarboxyamide)-2'-deoxyuridine
  misc_feature (9)..(9): n is 2'-deoxyadenosine-3'-phosphorothioate
  misc_feature (11)..(11): n is 1,3-propane diol
  misc_feature (12)..(12): n is 2'-O-methyl-cytidine
  misc_feature (15)..(15): n is 2'-deoxyguanosine-3'-phosphorothioate
  misc_feature (16)..(17): n is 5-(N-benzylcarboxyamide)-2'-deoxyuridine
  misc_feature (18)..(18): n is 5-(N-benzylcarboxyamide)-2'-O-methyl-uridine
  misc_feature (19)..(19): n is 2'-O-methyl-adenosine
  misc_feature (20)..(20): n is 5-(N-benzylcarboxyamide)-2'-deoxyuridine
  misc_feature (21)..(21): n is 2'-O-methyl-adenosine
  misc_feature (24)..(24): n is 2'-O-methyl-guanosine
nnncngnnncnngcnnnnnnngcn

SEQ ID NO: 319 - DNA, 24 bp, Artificial Sequence
  Synthetic
  misc_feature (1)..(1): n is 5-[N-(4-fluorobenzyl)carboxyamide]-2'-deoxyuridine
  misc_feature (2)..(2): n is 5-(N-benzylcarboxyamide)-2'-deoxyuridine
  misc_feature (3)..(3): n is 2'-O-methyl-adenosine
  misc_feature (5)..(5): n is hexaethylene glycol
  misc_feature (7)..(8): n is 5-(N-benzylcarboxyamide)-2'-deoxyuridine
  misc_feature (9)..(9): n is 2'-deoxyadenosine-3'-phosphorothioate
  misc_feature (11)..(11): n is 2'-O-methyl-adenosine
  misc_feature (12)..(12): n is 2'-O-methyl-cytidine
  misc_feature (15)..(15): n is 2'-deoxyguanosine-3'-phosphorothioate
  misc_feature (16)..(16): n is 5-(N-benzylcarboxyamide)-2'-deoxyuridine
  misc_feature (17)..(17): n is 5-[N-(phenyl-2-ethyl)-carboxyamide]-2'-deoxyuridine
  misc_feature (18)..(18): n is 5-(N-benzylcarboxyamide)-2'-O-methyl-uridine
  misc_feature (19)..(19): n is 2'-O-methyl-adenosine
  misc_feature (20)..(20): n is 5-(N-benzylcarboxyamide)-2'-deoxyuridine
  misc_feature (21)..(21): n is 2'-O-methyl-adenosine
  misc_feature (24)..(24): n is 2'-O-methyl-guanosine
nnncngnnncnngcnnnnnnngcn

SEQ ID NO: 320 - DNA, 24 bp, Artificial Sequence
  Synthetic
  misc_feature (1)..(1): n is 5-(N-benzylcarboxyamide)-2'-deoxyuridine
  misc_feature (2)..(2): n is 5-[N-(3,4-methylenedioxyphenyl-methyl)carboxyamide]-2'-deoxyuridi ne
  misc_feature (3)..(3): n is 2'-O-methyl-adenosine
  misc_feature (5)..(5): n is hexaethylene glycol
  misc_feature (7)..(8): n is 5-(N-benzylcarboxyamide)-2'-deoxyuridine
  misc_feature (9)..(9): n is 2'-deoxyadenosine-3'-phosphorothioate
  misc_feature (11)..(11): n is 2'-O-methyl-adenosine
  misc_feature (12)..(12): n is 2'-O-methyl-cytidine
  misc_feature (15)..(15): n is 2'-deoxyguanosine-3'-phosphorothioate
  misc_feature (16)..(16): n is 5-(N-benzylcarboxyamide)-2'-deoxyuridine
  misc_feature (17)..(17): n is 5-[N-(phenyl-2-ethyl)-carboxyamide]-2'-deoxyuridine
  misc_feature (18)..(18): n is 5-(N-benzylcarboxyamide)-2'-O-methyl-uridine
  misc_feature (19)..(19): n is 2'-O-methyl-adenosine
  misc_feature (20)..(20): n is 5-(N-benzylcarboxyamide)-2'-deoxyuridine
  misc_feature (21)..(21): n is 2'-O-methyl-adenosine
  misc_feature (24)..(24): n is 2'-O-methyl-guanosine
nnncngnnncnngcnnnnnnngcn

SEQ ID NO: 321 - DNA, 24 bp, Artificial Sequence
  Synthetic
  misc_feature (1)..(1): n is 5-[N-(4-fluorobenzyl)carboxyamide]-2'-deoxyuridine
  misc_feature (2)..(2): n is 5-[N-(3,4-methylenedioxyphenyl-methyl)carboxyamide]-2'-deoxyuridi ne
  misc_feature (3)..(3): n is 2'-O-methyl-adenosine
  misc_feature (5)..(5): n is hexaethylene glycol
  misc_feature (7)..(8): n is 5-(N-benzylcarboxyamide)-2'-deoxyuridine
  misc_feature (9)..(9): n is 2'-deoxyadenosine-3'-phosphorothioate
  misc_feature (11)..(11): n is 2'-O-methyl-adenosine
  misc_feature (12)..(12): n is 2'-O-methyl-cytidine
  misc_feature (15)..(15): n is 2'-deoxyguanosine-3'-phosphorothioate
  misc_feature (16)..(16): n is 5-(N-benzylcarboxyamide)-2'-deoxyuridine
  misc_feature (17)..(17): n is 5-[N-(phenyl-2-ethyl)-carboxyamide]-2'-deoxyuridine
  misc_feature (18)..(18): n is 5-(N-benzylcarboxyamide)-2'-O-methyl-uridine
  misc_feature (19)..(19): n is 2'-O-methyl-adenosine
  misc_feature (20)..(20): n is 5-(N-benzylcarboxyamide)-2'-deoxyuridine
  misc_feature (21)..(21): n is 2'-O-methyl-adenosine
  misc_feature (24)..(24): n is 2'-O-methyl-guanosine
nnncngnnncnngcnnnnnnngcn

SEQ ID NO: 322 - DNA, 24 bp, Artificial Sequence
  Synthetic
  misc_feature (1)..(1): n is 5-[N-(4-fluorobenzyl)carboxyamide]-2'-deoxyuridine
  misc_feature (2)..(2): n is 5-(N-benzylcarboxyamide)-2'-deoxyuridine
  misc_feature (3)..(3): n is 2'-O-methyl-adenosine
  misc_feature (5)..(5): n is hexaethylene glycol
  misc_feature (7)..(8): n is 5-(N-benzylcarboxyamide)-2'-deoxyuridine
  misc_feature (9)..(9): n is 2'-deoxyadenosine-3'-phosphorothioate
  misc_feature (11)..(11): n is 1,3-propane diol
  misc_feature (12)..(12): n is 2'-O-methyl-cytidine
  misc_feature (15)..(15): n is 2'-deoxyguanosine-3'-phosphorothioate
  misc_feature (16)..(16): n is 5-(N-benzylcarboxyamide)-2'-deoxyuridine
  misc_feature (17)..(17): n is 5-[N-(phenyl-2-ethyl)-carboxyamide]-2'-deoxyuridine
  misc_feature (18)..(18): n is 5-(N-benzylcarboxyamide)-2'-O-methyl-uridine
  misc_feature (19)..(19): n is 2'-O-methyl-adenosine
  misc_feature (20)..(20): n is 5-(N-benzylcarboxyamide)-2'-deoxyuridine
  misc_feature (21)..(21): n is 2'-O-methyl-adenosine
  misc_feature (24)..(24): n is 2'-O-methyl-guanosine
nnncngnnncnngcnnnnnnngcn

SEQ ID NO: 323 - DNA, 24 bp, Artificial Sequence
  Synthetic
  misc_feature (1)..(1): n is 5-(N-benzylcarboxyamide)-2'-deoxyuridine
  misc_feature (2)..(2): n is 5-[N-(3,4-methylenedioxyphenyl-methyl)carboxyamide]-2'-deoxyuridi ne
  misc_feature (3)..(3): n is 2'-O-methyl-adenosine
  misc_feature (5)..(5): n is hexaethylene glycol
  misc_feature (7)..(8): n is 5-(N-benzylcarboxyamide)-2'-deoxyuridine
  misc_feature (9)..(9): n is 2'-deoxyadenosine-3'-phosphorothioate
  misc_feature (11)..(11): n is 1,3-propane diol
  misc_feature (12)..(12): n is 2'-O-methyl-cytidine
  misc_feature (15)..(15): n is 2'-deoxyguanosine-3'-phosphorothioate
  misc_feature (16)..(16): n is 5-(N-benzylcarboxyamide)-2'-deoxyuridine
  misc_feature (17)..(17): n is 5-[N-(phenyl-2-ethyl)-carboxyamide]-2'-deoxyuridine
  misc_feature (18)..(18): n is 5-(N-benzylcarboxyamide)-2'-O-methyl-uridine
  misc_feature (19)..(19): n is 2'-O-methyl-adenosine
  misc_feature (20)..(20): n is 5-(N-benzylcarboxyamide)-2'-deoxyuridine
  misc_feature (21)..(21): n is 2'-O-methyl-adenosine
  misc_feature (24)..(24): n is 2'-O-methyl-guanosine
nnncngnnncnngcnnnnnnngcn

SEQ ID NO: 324 - DNA, 24 bp, Artificial Sequence
  Synthetic
  misc_feature (1)..(1): n is 5-[N-(4-fluorobenzyl)carboxyamide]-2'-deoxyuridine
  misc_feature (2)..(2): n is 5-[N-(3,4-methylenedioxyphenyl-methyl)carboxyamide]-2'-deoxyuridi ne
  misc_feature (3)..(3): n is 2'-O-methyl-adenosine
  misc_feature (5)..(5): n is hexaethylene glycol
  misc_feature (7)..(8): n is 5-(N-benzylcarboxyamide)-2'-deoxyuridine
  misc_feature (9)..(9): n is 2'-deoxyadenosine-3'-phosphorothioate
  misc_feature (11)..(11): n is 1,3-propane diol
  misc_feature (12)..(12): n is 2'-O-methyl-cytidine
  misc_feature (15)..(15): n is 2'-deoxyguanosine-3'-phosphorothioate
  misc_feature (16)..(16): n is 5-(N-benzylcarboxyamide)-2'-deoxyuridine
  misc_feature (17)..(17): n is 5-[N-(phenyl-2-ethyl)-carboxyamide]-2'-deoxyuridine
  misc_feature (18)..(18): n is 5-(N-benzylcarboxyamide)-2'-O-methyl-uridine
  misc_feature (19)..(19): n is 2'-O-methyl-adenosine
  misc_feature (20)..(20): n is 5-(N-benzylcarboxyamide)-2'-deoxyuridine
  misc_feature (21)..(21): n is 2'-O-methyl-adenosine
  misc_feature (24)..(24): n is 2'-O-methyl-guanosine
nnncngnnncnngcnnnnnnngcn

SEQ ID NO: 325 - DNA, 24 bp, Artificial Sequence
  Synthetic
  misc_feature (1)..(1): n is 5-[N-(4-fluorobenzyl)carboxyamide]-2'-deoxyuridine
  misc_feature (2)..(2): n is 5-[N-(3,4-methylenedioxyphenyl-methyl)carboxyamide]-2'-deoxyuridi ne
  misc_feature (3)..(3): n is 2'-O-methyl-adenosine
  misc_feature (5)..(5): n is hexaethylene glycol
  misc_feature (7)..(7): n is 5-(N-benzylcarboxyamide)-2'-O-methyl-uridine
  misc_feature (8)..(8): n is 5-(N-benzylcarboxyamide)-2'-deoxyuridine
  misc_feature (9)..(9): n is 2'-deoxyadenosine-3'-phosphorothioate
  misc_feature (11)..(11): n is 1,3-propane diol
  misc_feature (12)..(12): n is 2'-O-methyl-cytidine
  misc_feature (15)..(15): n is 2'-deoxyguanosine-3'-phosphorothioate
  misc_feature (16)..(17): n is 5-(N-benzylcarboxyamide)-2'-deoxyuridine
  misc_feature (18)..(18): n is 5-(N-benzylcarboxyamide)-2'-O-methyl-uridine
  misc_feature (19)..(19): n is 2'-O-methyl-adenosine
  misc_feature (20)..(20): n is 5-(N-benzylcarboxyamide)-2'-deoxyuridine
  misc_feature (21)..(21): n is 2'-O-methyl-adenosine
  misc_feature (24)..(24): n is 2'-O-methyl-guanosine
nnncngnnncnngcnnnnnnngcn

SEQ ID NO: 326 - DNA, 24 bp, Artificial Sequence
  Synthetic
  misc_feature (1)..(1): n is 5-[N-(4-fluorobenzyl)carboxyamide]-2'-deoxyuridine
  misc_feature (2)..(2): n is 5-[N-(3,4-methylenedioxyphenyl-methyl)carboxyamide]-2'-deoxyuridi ne
  misc_feature (3)..(3): n is 2'-O-methyl-adenosine
  misc_feature (5)..(5): n is hexaethylene glycol
  misc_feature (7)..(7): n is 5-(N-benzylcarboxyamide)-2'-O-methyl-uridine
  misc_feature (8)..(8): n is 5-(N-benzylcarboxyamide)-2'-deoxyuridine
  misc_feature (9)..(9): n is 2'-deoxyadenosine-3'-phosphorothioate
  misc_feature (11)..(11): n is 2'-O-methyl-adenosine
  misc_feature (12)..(12): n is 2'-O-methyl-cytidine
  misc_feature (15)..(15): n is 2'-deoxyguanosine-3'-phosphorothioate
  misc_feature (16)..(17): n is 5-(N-benzylcarboxyamide)-2'-deoxyuridine
  misc_feature (18)..(18): n is 5-(N-benzylcarboxyamide)-2'-O-methyl-uridine
  misc_feature (19)..(19): n is 2'-O-methyl-adenosine
  misc_feature (20)..(20): n is 5-(N-benzylcarboxyamide)-2'-deoxyuridine
  misc_feature (21)..(21): n is 2'-O-methyl-adenosine
  misc_feature (24)..(24): n is 2'-O-methyl-guanosine
nnncngnnncnngcnnnnnnngcn

SEQ ID NO: 327 - DNA, 27 bp, Artificial Sequence
  Synthetic
  misc_feature (1)..(2): n is 5-(N-benzylcarboxyamide)-2'-deoxyuridine
  misc_feature (8)..(8): n is 5-(N-benzylcarboxyamide)-2'-deoxyuridine
  misc_feature (12)..(13): n is 5-(N-benzylcarboxyamide)-2'-deoxyuridine
  misc_feature (20)..(22): n is 5-(N-benzylcarboxyamide)-2'-deoxyuridine
  misc_feature (24)..(24): n is 5-(N-benzylcarboxyamide)-2'-deoxyuridine
nnacgacnacgnnacagcgnnnanagc

SEQ ID NO: 328 - DNA, 22 bp, Artificial Sequence
  Synthetic
  misc_feature (1)..(2): n is 5-(N-benzylcarboxyamide)-2'-deoxyuridine
  misc_feature (5)..(5): n is hexaethylene glycol
  misc_feature (7)..(8): n is 5-(N-benzylcarboxyamide)-2'-deoxyuridine
  misc_feature (15)..(17): n is 5-(N-benzylcarboxyamide)-2'-deoxyuridine
  misc_feature (19)..(19): n is 5-(N-benzylcarboxyamide)-2'-deoxyuridine
nnacngnnacagcgnnnanagc

SEQ ID NO: 329 - DNA, 22 bp, Artificial Sequence
  Synthetic
  misc_feature (1)..(2): n is 5-(N-benzylcarboxyamide)-2'-deoxyuridine
  misc_feature (5)..(5): n is hexaethylene glycol
  misc_feature (7)..(8): n is 5-(N-benzylcarboxyamide)-2'-deoxyuridine
  misc_feature (11)..(11): n is 1,3-propane diol
  misc_feature (15)..(17): n is 5-(N-benzylcarboxyamide)-2'-deoxyuridine
  misc_feature (19)..(19): n is 5-(N-benzylcarboxyamide)-2'-deoxyuridine
nnacngnnacngcgnnnanagc

SEQ ID NO: 330 - DNA, 24 bp, Artificial Sequence
  Synthetic
  misc_feature (1)..(1): n is 5-(N-benzylcarboxyamide)-2'-deoxyuridine
  misc_feature (2)..(2): n is 5-[N-(3,4-methylenedioxyphenyl-methyl)carboxyamide]-2'-deoxyuridi ne
  misc_feature (3)..(3): n is 2'-O-methyl-adenosine
  misc_feature (5)..(5): n is hexaethylene glycol
  misc_feature (7)..(7): n is 5-(N-benzylcarboxyamide)-2'-O-methyl-uridine
  misc_feature (8)..(8): n is 5-(N-benzylcarboxyamide)-2'-deoxyuridine
  misc_feature (11)..(11): n is 1,3-propane diol
  misc_feature (12)..(12): n is 2'-O-methyl-cytidine
  misc_feature (15)..(15): n is 2'-O-methyl-guanosine
  misc_feature (16)..(17): n is 5-(N-benzylcarboxyamide)-2'-deoxyuridine
  misc_feature (18)..(18): n is 5-(N-benzylcarboxyamide)-2'-O-methyl-uridine
  misc_feature (19)..(19): n is 2'-O-methyl-adenosine
  misc_feature (20)..(20): n is 5-(N-benzylcarboxyamide)-2'-deoxyuridine
  misc_feature (21)..(21): n is 2'-O-methyl-adenosine
  misc_feature (24)..(24): n is 2'-O-methyl-guanosine
nnncngnnacnngcnnnnnnngcn

SEQ ID NO: 331 - DNA, 24 bp, Artificial Sequence
  Synthetic
  misc_feature (1)..(1): n is 5-(N-benzylcarboxyamide)-2'-deoxyuridine
  misc_feature (2)..(2): n is 5-[N-(3,4-methylenedioxyphenyl-methyl)carboxyamide]-2'-deoxyuridi ne
  misc_feature (3)..(3): n is 2'-O-methyl-adenosine
  misc_feature (5)..(5): n is hexaethylene glycol
  misc_feature (7)..(7): n is 5-(N-benzylcarboxyamide)-2'-O-methyl-uridine
  misc_feature (8)..(8): n is 5-(N-benzylcarboxyamide)-2'-deoxyuridine
  misc_feature (11)..(11): n is 1,3-propane diol
  misc_feature (12)..(12): n is 2'-O-methyl-cytidine
  misc_feature (15)..(15): n is 2'-O-methyl-guanosine
  misc_feature (16)..(16): n is 5-[N-(1-naphthylmethyl)carboxyamide]-2'-deoxyuridine
  misc_feature (17)..(17): n is 5-(N-benzylcarboxyamide)-2'-deoxyuridine
  misc_feature (18)..(18): n is 5-(N-benzylcarboxyamide)-2'-O-methyl-uridine
  misc_feature (19)..(19): n is 2'-O-methyl-adenosine
  misc_feature (20)..(20): n is 5-(N-benzylcarboxyamide)-2'-deoxyuridine
  misc_feature (21)..(21): n is 2'-O-methyl-adenosine
  misc_feature (24)..(24): n is 2'-O-methyl-guanosine
nnncngnnacnngcnnnnnnngcn

SEQ ID NO: 332 - DNA, 24 bp, Artificial Sequence
  Synthetic
  misc_feature (1)..(1): n is 5-(N-benzylcarboxyamide)-2'-deoxyuridine
  misc_feature (2)..(2): n is 5-[N-(3,4-methylenedioxyphenyl-methyl)carboxyamide]-2'-deoxyuridi ne
  misc_feature (3)..(3): n is 2'-O-methyl-adenosine
  misc_feature (5)..(5): n is hexaethylene glycol
  misc_feature (7)..(7): n is 5-(N-benzylcarboxyamide)-2'-O-methyl-uridine
  misc_feature (8)..(8): n is 5-(N-benzylcarboxyamide)-2'-deoxyuridine
  misc_feature (11)..(11): n is 1,3-propane diol
  misc_feature (12)..(12): n is 2'-O-methyl-cytidine
  misc_feature (15)..(15): n is 2'-O-methyl-guanosine
  misc_feature (16)..(16): n is 5-[N-(2-naphthylmethyl)carboxyamide]-2'-deoxyuridine
  misc_feature (17)..(17): n is 5-(N-benzylcarboxyamide)-2'-deoxyuridine
  misc_feature (18)..(18): n is 5-(N-benzylcarboxyamide)-2'-O-methyl-uridine
  misc_feature (19)..(19): n is 2'-O-methyl-adenosine
  misc_feature (20)..(20): n is 5-(N-benzylcarboxyamide)-2'-deoxyuridine
  misc_feature (21)..(21): n is 2'-O-methyl-adenosine
  misc_feature (24)..(24): n is 2'-O-methyl-guanosine
nnncngnnacnngcnnnnnnngcn

SEQ ID NO: 333 - DNA, 24 bp, Artificial Sequence
  Synthetic
  misc_feature (1)..(1): n is 5-(N-benzylcarboxyamide)-2'-deoxyuridine
  misc_feature (2)..(2): n is 5-[N-(3,4-methylenedioxyphenyl-methyl)carboxyamide]-2'-deoxyuridi ne
  misc_feature (3)..(3): n is 2'-O-methyl-adenosine
  misc_feature (5)..(5): n is hexaethylene glycol
  misc_feature (7)..(7): n is 5-(N-benzylcarboxyamide)-2'-O-methyl-uridine
  misc_feature (8)..(8): n is 5-(N-benzylcarboxyamide)-2'-deoxyuridine
  misc_feature (11)..(11): n is 1,3-propane diol
  misc_feature (12)..(12): n is 2'-O-methyl-cytidine
  misc_feature (13)..(13): n is 2'-O-methyl-guanosine
  misc_feature (16)..(17): n is 5-(N-benzylcarboxyamide)-2'-deoxyuridine
  misc_feature (18)..(18): n is 5-(N-benzylcarboxyamide)-2'-O-methyl-uridine
  misc_feature (19)..(19): n is 2'-O-methyl-adenosine
  misc_feature (20)..(20): n is 5-(N-benzylcarboxyamide)-2'-deoxyuridine
  misc_feature (21)..(21): n is 2'-O-methyl-adenosine
  misc_feature (24)..(24): n is 2'-O-methyl-guanosine
nnncngnnacnnncgnnnnnngcn

SEQ ID NO: 334 - DNA, 24 bp, Artificial Sequence
  Synthetic
  misc_feature (1)..(1): n is 5-(N-benzylcarboxyamide)-2'-deoxyuridine
  misc_feature (2)..(2): n is 5-[N-(3,4-methylenedioxyphenyl-methyl)carboxyamide]-2'-deoxyuridi ne
  misc_feature (3)..(3): n is 2'-O-methyl-adenosine
  misc_feature (5)..(5): n is hexaethylene glycol
  misc_feature (7)..(7): n is 5-(N-benzylcarboxyamide)-2'-O-methyl-uridine
  misc_feature (8)..(8): n is 5-(N-benzylcarboxyamide)-2'-deoxyuridine
  misc_feature (11)..(11): n is 1,3-propane diol
  misc_feature (12)..(12): n is 2'-O-methyl-cytidine
  misc_feature (13)..(13): n is 2'-O-methyl-guanosine
  misc_feature (15)..(15): n is 2'-O-methyl-guanosine
  misc_feature (16)..(17): n is 5-(N-benzylcarboxyamide)-2'-deoxyuridine
  misc_feature (18)..(18): n is 5-(N-benzylcarboxyamide)-2'-O-methyl-uridine
  misc_feature (19)..(19): n is 2'-O-methyl-adenosine
  misc_feature (20)..(20): n is 5-(N-benzylcarboxyamide)-2'-deoxyuridine
  misc_feature (21)..(21): n is 2'-O-methyl-adenosine
  misc_feature (24)..(24): n is 2'-O-methyl-guanosine
nnncngnnacnnncnnnnnnngcn

SEQ ID NO: 335 - DNA, 24 bp, Artificial Sequence
  Synthetic
  misc_feature (1)..(1): n is 5-(N-benzylcarboxyamide)-2'-deoxyuridine
  misc_feature (2)..(2): n is 5-[N-(3,4-methylenedioxyphenyl-methyl)carboxyamide]-2'-deoxyuridi ne
  misc_feature (3)..(3): n is 2'-O-methyl-adenosine
  misc_feature (5)..(5): n is hexaethylene glycol
  misc_feature (7)..(7): n is 5-(N-benzylcarboxyamide)-2'-O-methyl-uridine
  misc_feature (8)..(8): n is 5-(N-benzylcarboxyamide)-2'-deoxyuridine
  misc_feature (11)..(11): n is 1,3-propane diol
  misc_feature (12)..(12): n is 2'-O-methyl-cytidine
  misc_feature (13)..(13): n is 2'-O-methyl-guanosine
  misc_feature (16)..(16): n is 5-[N-(1-naphthylmethyl)carboxyamide]-2'-deoxyuridine
  misc_feature (17)..(17): n is 5-(N-benzylcarboxyamide)-2'-deoxyuridine
  misc_feature (18)..(18): n is 5-(N-benzylcarboxyamide)-2'-O-methyl-uridine
  misc_feature (19)..(19): n is 2'-O-methyl-adenosine
  misc_feature (20)..(20): n is 5-(N-benzylcarboxyamide)-2'-deoxyuridine
  misc_feature (21)..(21): n is 2'-O-methyl-adenosine
  misc_feature (24)..(24): n is 2'-O-methyl-guanosine
nnncngnnacnnncgnnnnnngcn

SEQ ID NO: 336 - DNA, 24 bp, Artificial Sequence
  Synthetic
  misc_feature (1)..(1): n is 5-(N-benzylcarboxyamide)-2'-deoxyuridine
  misc_feature (2)..(2): n is 5-[N-(3,4-methylenedioxyphenyl-methyl)carboxyamide]-2'-deoxyuridi ne
  misc_feature (3)..(3): n is 2'-O-methyl-adenosine
  misc_feature (5)..(5): n is hexaethylene glycol
  misc_feature (7)..(7): n is 5-(N-benzylcarboxyamide)-2'-O-methyl-uridine
  misc_feature (8)..(8): n is 5-(N-benzylcarboxyamide)-2'-deoxyuridine
  misc_feature (11)..(11): n is 1,3-propane diol
  misc_feature (12)..(12): n is 2'-O-methyl-cytidine
  misc_feature (13)..(13): n is 2'-O-methyl-guanosine
  misc_feature (14)..(14): n is 2'-O-methyl-cytidine
  misc_feature (16)..(17): n is 5-(N-benzylcarboxyamide)-2'-deoxyuridine
  misc_feature (18)..(18): n is 5-(N-benzylcarboxyamide)-2'-O-methyl-uridine
  misc_feature (19)..(19): n is 2'-O-methyl-adenosine
  misc_feature (20)..(20): n is 5-(N-benzylcarboxyamide)-2'-deoxyuridine
  misc_feature (21)..(21): n is 2'-O-methyl-adenosine
  misc_feature (24)..(24): n is 2'-O-methyl-guanosine
nnncngnnacnnnngnnnnnngcn

SEQ ID NO: 337 - DNA, 24 bp, Artificial Sequence
  Synthetic
  misc_feature (1)..(1): n is 5-(N-benzylcarboxyamide)-2'-deoxyuridine
  misc_feature (2)..(2): n is 5-[N-(3,4-methylenedioxyphenyl-methyl)carboxyamide]-2'-deoxyuridi ne
  misc_feature (3)..(3): n is 2'-O-methyl-adenosine
  misc_feature (5)..(5): n is hexaethylene glycol
  misc_feature (7)..(7): n is 5-(N-benzylcarboxyamide)-2'-O-methyl-uridine
  misc_feature (8)..(8): n is 5-(N-benzylcarboxyamide)-2'-deoxyuridine
  misc_feature (9)..(9): n is 2'-O-methyl-adenosine
  misc_feature (11)..(11): n is 1,3-propane diol
  misc_feature (12)..(12): n is 2'-O-methyl-cytidine
  misc_feature (16)..(17): n is 5-(N-benzylcarboxyamide)-2'-deoxyuridine
  misc_feature (18)..(18): n is 5-(N-benzylcarboxyamide)-2'-O-methyl-uridine
  misc_feature (19)..(19): n is 2'-O-methyl-adenosine
  misc_feature (20)..(20): n is 5-(N-benzylcarboxyamide)-2'-deoxyuridine
  misc_feature (21)..(21): n is 2'-O-methyl-adenosine
  misc_feature (24)..(24): n is 2'-O-methyl-guanosine
nnncngnnncnngcgnnnnnngcn

SEQ ID NO: 338 - DNA, 24 bp, Artificial Sequence
  Synthetic
  misc_feature (1)..(1): n is 5-(N-benzylcarboxyamide)-2'-deoxyuridine
  misc_feature (2)..(2): n is 5-[N-(3,4-methylenedioxyphenyl-methyl)carboxyamide]-2'-deoxyuridi ne
  misc_feature (3)..(3): n is 2'-O-methyl-adenosine
  misc_feature (5)..(5): n is hexaethylene glycol
  misc_feature (7)..(7): n is 5-(N-benzylcarboxyamide)-2'-O-methyl-uridine
  misc_feature (8)..(8): n is 5-(N-benzylcarboxyamide)-2'-deoxyuridine
  misc_feature (9)..(9): n is 2'-deoxyadenosine-3'-phosphorothioate
  misc_feature (11)..(11): n is 1,3-propane diol
  misc_feature (12)..(12): n is 2'-O-methyl-cytidine
  misc_feature (15)..(15): n is 2'-deoxyguanosine-3'-phosphorothioate
  misc_feature (16)..(16): n is 5-[N-(1-naphthylmethyl)carboxyamide]-2'-deoxyuridine
  misc_feature (17)..(17): n is 5-(N-benzylcarboxyamide)-2'-deoxyuridine-3'-phosphorothioate
  misc_feature (18)..(18): n is 5-(N-benzylcarboxyamide)-2'-O-methyl-uridine
  misc_feature (19)..(19): n is 2'-O-methyl-adenosine
  misc_feature (20)..(20): n is 5-(N-benzylcarboxyamide)-2'-deoxyuridine
  misc_feature (21)..(21): n is 2'-O-methyl-adenosine
  misc_feature (24)..(24): n is 2'-O-methyl-guanosine
nnncngnnncnngcnnnnnnngcn

SEQ ID NO: 339 - DNA, 24 bp, Artificial Sequence
  Synthetic
  misc_feature (1)..(1): n is 5-(N-benzylcarboxyamide)-2'-deoxyuridine
  misc_feature (2)..(2): n is 5-[N-(3,4-methylenedioxyphenyl-methyl)carboxyamide]-2'-deoxyuridi ne
  misc_feature (3)..(3): n is 2'-O-methyl-adenosine
  misc_feature (5)..(5): n is hexaethylene glycol
  misc_feature (7)..(7): n is 5-(N-benzylcarboxyamide)-2'-O-methyl-uridine
  misc_feature (8)..(8): n is 5-(N-benzylcarboxyamide)-2'-deoxyuridine
  misc_feature (9)..(9): n is 2'-deoxyadenosine-3'-phosphorothioate
  misc_feature (11)..(11): n is 1,3-propane diol
  misc_feature (12)..(12): n is 2'-O-methyl-cytidine
  misc_feature (15)..(15): n is 2'-deoxyguanosine-3'-phosphorothioate
  misc_feature (16)..(16): n is 5-(N-benzylcarboxyamide)-2'-deoxyuridine
  misc_feature (17)..(17): n is 5-(N-benzylcarboxyamide)-2'-deoxyuridine-3'-phosphorothioate
  misc_feature (18)..(18): n is 5-(N-benzylcarboxyamide)-2'-O-methyl-uridine
  misc_feature (19)..(19): n is 2'-O-methyl-adenosine
  misc_feature (20)..(20): n is 5-(N-benzylcarboxyamide)-2'-deoxyuridine
  misc_feature (21)..(21): n is 2'-O-methyl-adenosine
  misc_feature (24)..(24): n is 2'-O-methyl-guanosine
nnncngnnncnngcnnnnnnngcn

SEQ ID NO: 340 - DNA, 24 bp, Artificial Sequence
  Synthetic
  misc_feature (1)..(1): n is 5-(N-benzylcarboxyamide)-2'-deoxyuridine
  misc_feature (2)..(2): n is 5-[N-(3,4-methylenedioxyphenyl-methyl)carboxyamide]-2'-deoxyuridi ne
  misc_feature (3)..(3): n is 2'-O-methyl-adenosine
  misc_feature (5)..(5): n is hexaethylene glycol
  misc_feature (7)..(7): n is 5-(N-benzylcarboxyamide)-2'-O-methyl-uridine
  misc_feature (8)..(8): n is 5-(N-benzylcarboxyamide)-2'-deoxyuridine
  misc_feature (9)..(9): n is 2'-deoxyadenosine-3'-phosphorothioate
  misc_feature (11)..(11): n is 1,3-propane diol
  misc_feature (12)..(12): n is 2'-O-methyl-cytidine
  misc_feature (15)..(15): n is 2'-deoxyguanosine-3'-phosphorothioate
  misc_feature (16)..(16): n is 5-[N-(1-naphthylmethyl)carboxyamide]-2'-deoxyuridine
  misc_feature (17)..(17): n is 5-(N-benzylcarboxyamide)-2'-deoxyuridine
  misc_feature (18)..(18): n is 5-(N-benzylcarboxyamide)-2'-O-methyl-uridine
  misc_feature (19)..(19): n is 2'-O-methyl-adenosine
  misc_feature (20)..(20): n is 5-(N-benzylcarboxyamide)-2'-deoxyuridine
  misc_feature (21)..(21): n is 2'-O-methyl-adenosine
  misc_feature (24)..(24): n is 2'-O-methyl-guanosine
nnncngnnncnngcnnnnnnngcn

SEQ ID NO: 341 - DNA, 24 bp, Artificial Sequence
  Synthetic
  misc_feature (1)..(1): n is 5-(N-benzylcarboxyamide)-2'-deoxyuridine
  misc_feature (2)..(2): n is 5-[N-(3,4-methylenedioxyphenyl-methyl)carboxyamide]-2'-deoxyuridi ne
  misc_feature (3)..(3): n is 2'-O-methyl-adenosine
  misc_feature (5)..(5): n is hexaethylene glycol
  misc_feature (7)..(7): n is 5-(N-benzylcarboxyamide)-2'-O-methyl-uridine
  misc_feature (8)..(8): n is 5-(N-benzylcarboxyamide)-2'-deoxyuridine
  misc_feature (9)..(9): n is 2'-deoxyadenosine-3'-phosphorothioate
  misc_feature (11)..(11): n is 1,3-propane diol
  misc_feature (12)..(12): n is 2'-O-methyl-cytidine
  misc_feature (15)..(15): n is 2'-deoxyguanosine-3'-phosphorothioate
  misc_feature (16)..(17): n is 5-(N-benzylcarboxyamide)-2'-deoxyuridine
  misc_feature (18)..(18): n is 5-(N-benzylcarboxyamide)-2'-O-methyl-uridine
  misc_feature (19)..(19): n is 2'-O-methyl-adenosine
  misc_feature (20)..(20): n is 5-(N-benzylcarboxyamide)-2'-deoxyuridine
  misc_feature (21)..(21): n is 2'-O-methyl-adenosine
  misc_feature (24)..(24): n is 2'-O-methyl-guanosine
nnncngnnncnngcnnnnnnngcn

SEQ ID NO: 342 - DNA, 24 bp, Artificial Sequence
  Synthetic
  misc_feature (1)..(2): n is 5-(N-benzylcarboxyamide)-2'-deoxyuridine
  misc_feature (3)..(3): n is 2'-O-methyl-adenosine
  misc_feature (5)..(5): n is hexaethylene glycol
  misc_feature (7)..(7): n is 5-(N-benzylcarboxyamide)-2'-O-methyl-uridine
  misc_feature (8)..(8): n is 5-(N-benzylcarboxyamide)-2'-deoxyuridine
  misc_feature (9)..(9): n is 2'-deoxyadenosine-3'-phosphorothioate
  misc_feature (11)..(11): n is 1,3-propane diol
  misc_feature (12)..(12): n is 2'-O-methyl-cytidine
  misc_feature (15)..(15): n is 2'-deoxyguanosine-3'-phosphorothioate
  misc_feature (16)..(16): n is 5-[N-(1-naphthylmethyl)carboxyamide]-2'-deoxyuridine
  misc_feature (17)..(17): n is 5-(N-benzylcarboxyamide)-2'-deoxyuridine-3'-phosphorothioate
  misc_feature (18)..(18): n is 5-(N-benzylcarboxyamide)-2'-O-methyl-uridine
  misc_feature (19)..(19): n is 2'-O-methyl-adenosine
  misc_feature (20)..(20): n is 5-(N-benzylcarboxyamide)-2'-deoxyuridine
  misc_feature (21)..(21): n is 2'-O-methyl-adenosine
  misc_feature (24)..(24): n is 2'-O-methyl-guanosine
nnncngnnncnngcnnnnnnngcn

SEQ ID NO: 343 - DNA, 24 bp, Artificial Sequence
  Synthetic
  misc_feature (1)..(2): n is 5-(N-benzylcarboxyamide)-2'-deoxyuridine
  misc_feature (3)..(3): n is 2'-O-methyl-adenosine
  misc_feature (5)..(5): n is hexaethylene glycol
  misc_feature (7)..(7): n is 5-(N-benzylcarboxyamide)-2'-O-methyl-uridine
  misc_feature (8)..(8): n is 5-(N-benzylcarboxyamide)-2'-deoxyuridine
  misc_feature (9)..(9): n is 2'-deoxyadenosine-3'-phosphorothioate
  misc_feature (11)..(11): n is 1,3-propane diol
  misc_feature (12)..(12): n is 2'-O-methyl-cytidine
  misc_feature (15)..(15): n is 2'-deoxyguanosine-3'-phosphorothioate
  misc_feature (16)..(16): n is 5-(N-benzylcarboxyamide)-2'-deoxyuridine
  misc_feature (17)..(17): n is 5-(N-benzylcarboxyamide)-2'-deoxyuridine-3'-phosphorothioate
  misc_feature (18)..(18): n is 5-(N-benzylcarboxyamide)-2'-O-methyl-uridine
  misc_feature (19)..(19): n is 2'-O-methyl-adenosine
  misc_feature (20)..(20): n is 5-(N-benzylcarboxyamide)-2'-deoxyuridine
  misc_feature (21)..(21): n is 2'-O-methyl-adenosine
  misc_feature (24)..(24): n is 2'-O-methyl-guanosine
nnncngnnncnngcnnnnnnngcn

SEQ ID NO: 344 - DNA, 24 bp, Artificial Sequence
  Synthetic
  misc_feature (1)..(2): n is 5-(N-benzylcarboxyamide)-2'-deoxyuridine
  misc_feature (3)..(3): n is 2'-O-methyl-adenosine
  misc_feature (5)..(5): n is hexaethylene glycol
  misc_feature (7)..(7): n is 5-(N-benzylcarboxyamide)-2'-O-methyl-uridine
  misc_feature (8)..(8): n is 5-(N-benzylcarboxyamide)-2'-deoxyuridine
  misc_feature (9)..(9): n is 2'-deoxyadenosine-3'-phosphorothioate
  misc_feature (11)..(11): n is 1,3-propane diol
  misc_feature (12)..(12): n is 2'-O-methyl-cytidine
  misc_feature (15)..(15): n is 2'-deoxyguanosine-3'-phosphorothioate
  misc_feature (16)..(16): n is 5-[N-(1-naphthylmethyl)carboxyamide]-2'-deoxyuridine
  misc_feature (17)..(17): n is 5-(N-benzylcarboxyamide)-2'-deoxyuridine
  misc_feature (18)..(18): n is 5-(N-benzylcarboxyamide)-2'-O-methyl-uridine
  misc_feature (19)..(19): n is 2'-O-methyl-adenosine
  misc_feature (20)..(20): n is 5-(N-benzylcarboxyamide)-2'-deoxyuridine
  misc_feature (21)..(21): n is 2'-O-methyl-adenosine
  misc_feature (24)..(24): n is 2'-O-methyl-guanosine
nnncngnnncnngcnnnnnnngcn

SEQ ID NO: 345 - DNA, 42 bp, Artificial Sequence
  Synthetic
  misc_feature (5)..(5): n is 5-(N-benzylcarboxyamide)-2'-deoxyuridine
  misc_feature (9)..(10): n is 5-(N-benzylcarboxyamide)-2'-deoxyuridine
  misc_feature (18)..(20): n is 5-(N-benzylcarboxyamide)-2'-deoxyuridine
  misc_feature (22)..(22): n is 5-(N-benzylcarboxyamide)-2'-deoxyuridine
  misc_feature (27)..(27): n is 5-(N-benzylcarboxyamide)-2'-deoxyuridine
  misc_feature (37)..(37): n is 5-(N-benzylcarboxyamide)-2'-deoxyuridine
cgacnacgnnacacgcgnnnanagcgncaacccgagngaaca

SEQ ID NO: 346 - DNA, 40 bp, Artificial Sequence
  Synthetic
  misc_feature (3)..(3): n is 5-(N-benzylcarboxyamide)-2'-deoxyuridine
  misc_feature (7)..(8): n is 5-(N-benzylcarboxyamide)-2'-deoxyuridine
  misc_feature (16)..(18): n is 5-(N-benzylcarboxyamide)-2'-deoxyuridine
  misc_feature (20)..(20): n is 5-(N-benzylcarboxyamide)-2'-deoxyuridine
  misc_feature (25)..(25): n is 5-(N-benzylcarboxyamide)-2'-deoxyuridine
  misc_feature (35)..(35): n is 5-(N-benzylcarboxyamide)-2'-deoxyuridine
acnacgnnacacgcgnnnanagcgncaacccgagngaaca

SEQ ID NO: 347 - DNA, 38 bp, Artificial Sequence
  Synthetic
  misc_feature (1)..(1): n is 5-(N-benzylcarboxyamide)-2'-deoxyuridine
  misc_feature (5)..(6): n is 5-(N-benzylcarboxyamide)-2'-deoxyuridine
  misc_feature (14)..(16): n is 5-(N-benzylcarboxyamide)-2'-deoxyuridine
  misc_feature (18)..(18): n is 5-(N-benzylcarboxyamide)-2'-deoxyuridine
  misc_feature (23)..(23): n is 5-(N-benzylcarboxyamide)-2'-deoxyuridine
  misc_feature (33)..(33): n is 5-(N-benzylcarboxyamide)-2'-deoxyuridine
nacgnnacacgcgnnnanagcgncaacccgagngaaca

SEQ ID NO: 348 - DNA, 36 bp, Artificial Sequence
  Synthetic
  misc_feature (3)..(4): n is 5-(N-benzylcarboxyamide)-2'-deoxyuridine
  misc_feature (12)..(14): n is 5-(N-benzylcarboxyamide)-2'-deoxyuridine
  misc_feature (16)..(16): n is 5-(N-benzylcarboxyamide)-2'-deoxyuridine
  misc_feature (21)..(21): n is 5-(N-benzylcarboxyamide)-2'-deoxyuridine
  misc_feature (31)..(31): n is 5-(N-benzylcarboxyamide)-2'-deoxyuridine
cgnnacacgcgnnnanagcgncaacccgagngaaca

SEQ ID NO: 349 - DNA, 34 bp, Artificial Sequence
  Synthetic
  misc_feature (1)..(2): n is 5-(N-benzylcarboxyamide)-2'-deoxyuridine
  misc_feature (10)..(12): n is 5-(N-benzylcarboxyamide)-2'-deoxyuridine
  misc_feature (14)..(14): n is 5-(N-benzylcarboxyamide)-2'-deoxyuridine
  misc_feature (19)..(19): n is 5-(N-benzylcarboxyamide)-2'-deoxyuridine
  misc_feature (29)..(29): n is 5-(N-benzylcarboxyamide)-2'-deoxyuridine
nnacacgcgnnnanagcgncaacccgagngaaca

SEQ ID NO: 350 - DNA, 32 bp, Artificial Sequence
  Synthetic
  misc_feature (8)..(10): n is 5-(N-benzylcarboxyamide)-2'-deoxyuridine
  misc_feature (12)..(12): n is 5-(N-benzylcarboxyamide)-2'-deoxyuridine
  misc_feature (17)..(17): n is 5-(N-benzylcarboxyamide)-2'-deoxyuridine
  misc_feature (27)..(27): n is 5-(N-benzylcarboxyamide)-2'-deoxyuridine
acacgcgnnnanagcgncaacccgagngaaca

SEQ ID NO: 351 - DNA, 27 bp, Artificial Sequence
  Synthetic
  misc_feature (2)..(3): n is 5-(N-benzylcarboxyamide)-2'-deoxyuridine
  misc_feature (9)..(9): n is 5-(N-benzylcarboxyamide)-2'-deoxyuridine
  misc_feature (13)..(14): n is 5-(N-benzylcarboxyamide)-2'-deoxyuridine
  misc_feature (22)..(24): n is 5-(N-benzylcarboxyamide)-2'-deoxyuridine
  misc_feature (26)..(26): n is 5-(N-benzylcarboxyamide)-2'-deoxyuridine
cnnacgacnacgnnacacgcgnnnana

SEQ ID NO: 352 - DNA, 26 bp, Artificial Sequence
  Synthetic
  misc_feature (2)..(3): n is 5-(N-benzylcarboxyamide)-2'-deoxyuridine
  misc_feature (9)..(9): n is 5-(N-benzylcarboxyamide)-2'-deoxyuridine
  misc_feature (13)..(14): n is 5-(N-benzylcarboxyamide)-2'-deoxyuridine
  misc_feature (22)..(24): n is 5-(N-benzylcarboxyamide)-2'-deoxyuridine
cnnacgacnacgnnacacgcgnnnat

SEQ ID NO: 353 - DNA, 25 bp, Artificial Sequence
  Synthetic
  misc_feature (2)..(3): n is 5-(N-benzylcarboxyamide)-2'-deoxyuridine
  misc_feature (9)..(9): n is 5-(N-benzylcarboxyamide)-2'-deoxyuridine
  misc_feature (13)..(14): n is 5-(N-benzylcarboxyamide)-2'-deoxyuridine
  misc_feature (22)..(24): n is 5-(N-benzylcarboxyamide)-2'-deoxyuridine
cnnacgacnacgnnacacgcgnnna

SEQ ID NO: 354 - DNA, 26 bp, Artificial Sequence
  Synthetic
  misc_feature (1)..(2): n is 5-(N-benzylcarboxyamide)-2'-deoxyuridine
  misc_feature (8)..(8): n is 5-(N-benzylcarboxyamide)-2'-deoxyuridine
  misc_feature (12)..(13): n is 5-(N-benzylcarboxyamide)-2'-deoxyuridine
  misc_feature (21)..(23): n is 5-(N-benzylcarboxyamide)-2'-deoxyuridine
  misc_feature (25)..(25): n is 5-(N-benzylcarboxyamide)-2'-deoxyuridine
nnacgacnacgnnacacgcgnnnana

SEQ ID NO: 355 - DNA, 25 bp, Artificial Sequence
  Synthetic
  misc_feature (1)..(2): n is 5-(N-benzylcarboxyamide)-2'-deoxyuridine
  misc_feature (8)..(8): n is 5-(N-benzylcarboxyamide)-2'-deoxyuridine
  misc_feature (12)..(13): n is 5-(N-benzylcarboxyamide)-2'-deoxyuridine
  misc_feature (21)..(23): n is 5-(N-benzylcarboxyamide)-2'-deoxyuridine
nnacgacnacgnnacacgcgnnnat

SEQ ID NO: 356 - DNA, 24 bp, Artificial Sequence
  Synthetic
  misc_feature (1)..(2): n is 5-(N-benzylcarboxyamide)-2'-deoxyuridine
  misc_feature (8)..(8): n is 5-(N-benzylcarboxyamide)-2'-deoxyuridine
  misc_feature (12)..(13): n is 5-(N-benzylcarboxyamide)-2'-deoxyuridine
  misc_feature (21)..(23): n is 5-(N-benzylcarboxyamide)-2'-deoxyuridine
nnacgacnacgnnacacgcgnnna

SEQ ID NO: 357 - DNA, 29 bp, Artificial Sequence
  Synthetic
  misc_feature (1)..(1): n is 5-(N-benzylcarboxyamide)-2'-deoxyuridine
  misc_feature (2)..(2): n is 1,3-propane diol
  misc_feature (8)..(8): n is 5-(N-benzylcarboxyamide)-2'-deoxyuridine
  misc_feature (12)..(13): n is 5-(N-benzylcarboxyamide)-2'-deoxyuridine
  misc_feature (21)..(23): n is 5-(N-benzylcarboxyamide)-2'-deoxyuridine
  misc_feature (25)..(25): n is 5-(N-benzylcarboxyamide)-2'-deoxyuridine
nnacgacnacgnnacacgcgnnnanagcg

SEQ ID NO: 358 - DNA, 29 bp, Artificial Sequence
  Synthetic
  misc_feature (1)..(2): n is 5-(N-benzylcarboxyamide)-2'-deoxyuridine
  misc_feature (3)..(3): n is 1,3-propane diol
  misc_feature (8)..(8): n is 5-(N-benzylcarboxyamide)-2'-deoxyuridine
  misc_feature (12)..(13): n is 5-(N-benzylcarboxyamide)-2'-deoxyuridine
  misc_feature (21)..(23): n is 5-(N-benzylcarboxyamide)-2'-deoxyuridine
  misc_feature (25)..(25): n is 5-(N-benzylcarboxyamide)-2'-deoxyuridine
nnncgacnacgnnacacgcgnnnanagcg

SEQ ID NO: 359 - DNA, 29 bp, Artificial Sequence
  Synthetic
  misc_feature (1)..(2): n is 5-(N-benzylcarboxyamide)-2'-deoxyuridine
  misc_feature (8)..(8): n is 5-(N-benzylcarboxyamide)-2'-deoxyuridine
  misc_feature (11)..(11): n is 1,3-propane diol
  misc_feature (12)..(13): n is 5-(N-benzylcarboxyamide)-2'-deoxyuridine
  misc_feature (21)..(23): n is 5-(N-benzylcarboxyamide)-2'-deoxyuridine
  misc_feature (25)..(25): n is 5-(N-benzylcarboxyamide)-2'-deoxyuridine
nnacgacnacnnnacacgcgnnnanagcg

SEQ ID NO: 360 - DNA, 29 bp, Artificial Sequence
  Synthetic
  misc_feature (1)..(2): n is 5-(N-benzylcarboxyamide)-2'-deoxyuridine
  misc_feature (8)..(8): n is 5-(N-benzylcarboxyamide)-2'-deoxyuridine
  misc_feature (12)..(12): n is 1,3-propane diol
  misc_feature (13)..(13): n is 5-(N-benzylcarboxyamide)-2'-deoxyuridine
  misc_feature (21)..(23): n is 5-(N-benzylcarboxyamide)-2'-deoxyuridine
  misc_feature (25)..(25): n is 5-(N-benzylcarboxyamide)-2'-deoxyuridine
nnacgacnacgnnacacgcgnnnanagcg

SEQ ID NO: 361 - DNA, 29 bp, Artificial Sequence
  Synthetic
  misc_feature (1)..(2): n is 5-(N-benzylcarboxyamide)-2'-deoxyuridine
  misc_feature (8)..(8): n is 5-(N-benzylcarboxyamide)-2'-deoxyuridine
  misc_feature (12)..(12): n is 5-(N-benzylcarboxyamide)-2'-deoxyuridine
  misc_feature (13)..(13): n is 1,3-propane diol
  misc_feature (21)..(23): n is 5-(N-benzylcarboxyamide)-2'-deoxyuridine
  misc_feature (25)..(25): n is 5-(N-benzylcarboxyamide)-2'-deoxyuridine
nnacgacnacgnnacacgcgnnnanagcg

SEQ ID NO: 362 - DNA, 29 bp, Artificial Sequence
  Synthetic
  misc_feature (1)..(2): n is 5-(N-benzylcarboxyamide)-2'-deoxyuridine
  misc_feature (8)..(8): n is 5-(N-benzylcarboxyamide)-2'-deoxyuridine
  misc_feature (12)..(13): n is 5-(N-benzylcarboxyamide)-2'-deoxyuridine
  misc_feature (14)..(14): n is 1,3-propane diol
  misc_feature (21)..(23): n is 5-(N-benzylcarboxyamide)-2'-deoxyuridine
  misc_feature (25)..(25): n is 5-(N-benzylcarboxyamide)-2'-deoxyuridine
nnacgacnacgnnncacgcgnnnanagcg

SEQ ID NO: 363 - DNA, 29 bp, Artificial Sequence
  Synthetic
  misc_feature (1)..(2): n is 5-(N-benzylcarboxyamide)-2'-deoxyuridine
  misc_feature (8)..(8): n is 5-(N-benzylcarboxyamide)-2'-deoxyuridine
  misc_feature (12)..(13): n is 5-(N-benzylcarboxyamide)-2'-deoxyuridine
  misc_feature (18)..(18): n is 1,3-propane diol
  misc_feature (21)..(23): n is 5-(N-benzylcarboxyamide)-2'-deoxyuridine
  misc_feature (25)..(25): n is 5-(N-benzylcarboxyamide)-2'-deoxyuridine
nnacgacnacgnnacacncgnnnanagcg

SEQ ID NO: 364 - DNA, 29 bp, Artificial Sequence
  Synthetic
  misc_feature (1)..(2): n is 5-(N-benzylcarboxyamide)-2'-deoxyuridine
  misc_feature (8)..(8): n is 5-(N-benzylcarboxyamide)-2'-deoxyuridine
  misc_feature (12)..(13): n is 5-(N-benzylcarboxyamide)-2'-deoxyuridine
  misc_feature (19)..(19): n is 1,3-propane diol
  misc_feature (21)..(23): n is 5-(N-benzylcarboxyamide)-2'-deoxyuridine
  misc_feature (25)..(25): n is 5-(N-benzylcarboxyamide)-2'-deoxyuridine
nnacgacnacgnnacacgngnnnanagcg

SEQ ID NO: 365 - DNA, 29 bp, Artificial Sequence
  Synthetic
  misc_feature (1)..(2): n is 5-(N-benzylcarboxyamide)-2'-deoxyuridine
  misc_feature (8)..(8): n is 5-(N-benzylcarboxyamide)-2'-deoxyuridine
  misc_feature (12)..(13): n is 5-(N-benzylcarboxyamide)-2'-deoxyuridine
  misc_feature (20)..(20): n is 1,3-propane diol
  misc_feature (21)..(23): n is 5-(N-benzylcarboxyamide)-2'-deoxyuridine
  misc_feature (25)..(25): n is 5-(N-benzylcarboxyamide)-2'-deoxyuridine
nnacgacnacgnnacacgcnnnnanagcg

SEQ ID NO: 366 - DNA, 29 bp, Artificial Sequence
  Synthetic
  misc_feature (1)..(2): n is 5-(N-benzylcarboxyamide)-2'-deoxyuridine
  misc_feature (8)..(8): n is 5-(N-benzylcarboxyamide)-2'-deoxyuridine
  misc_feature (12)..(13): n is 5-(N-benzylcarboxyamide)-2'-deoxyuridine
  misc_feature (21)..(21): n is 1,3-propane diol
  misc_feature (22)..(23): n is 5-(N-benzylcarboxyamide)-2'-deoxyuridine
  misc_feature (25)..(25): n is 5-(N-benzylcarboxyamide)-2'-deoxyuridine
nnacgacnacgnnacacgcgnnnanagcg

SEQ ID NO: 367 - DNA, 29 bp, Artificial Sequence
  Synthetic
  misc_feature (1)..(2): n is 5-(N-benzylcarboxyamide)-2'-deoxyuridine
  misc_feature (8)..(8): n is 5-(N-benzylcarboxyamide)-2'-deoxyuridine
  misc_feature (12)..(13): n is 5-(N-benzylcarboxyamide)-2'-deoxyuridine
  misc_feature (21)..(21): n is 5-(N-benzylcarboxyamide)-2'-deoxyuridine
  misc_feature (22)..(22): n is 1,3-propane diol
  misc_feature (23)..(23): n is 5-(N-benzylcarboxyamide)-2'-deoxyuridine
  misc_feature (25)..(25): n is 5-(N-benzylcarboxyamide)-2'-deoxyuridine
nnacgacnacgnnacacgcgnnnanagcg

SEQ ID NO: 368 - DNA, 29 bp, Artificial Sequence
  Synthetic
  misc_feature (1)..(2): n is 5-(N-benzylcarboxyamide)-2'-deoxyuridine
  misc_feature (8)..(8): n is 5-(N-benzylcarboxyamide)-2'-deoxyuridine
  misc_feature (12)..(13): n is 5-(N-benzylcarboxyamide)-2'-deoxyuridine
  misc_feature (21)..(22): n is 5-(N-benzylcarboxyamide)-2'-deoxyuridine
  misc_feature (23)..(23): n is 1,3-propane diol
  misc_feature (25)..(25): n is 5-(N-benzylcarboxyamide)-2'-deoxyuridine
nnacgacnacgnnacacgcgnnnanagcg

SEQ ID NO: 369 - DNA, 29 bp, Artificial Sequence
  Synthetic
  misc_feature (1)..(2): n is 5-(N-benzylcarboxyamide)-2'-deoxyuridine
  misc_feature (8)..(8): n is 5-(N-benzylcarboxyamide)-2'-deoxyuridine
  misc_feature (12)..(13): n is 5-(N-benzylcarboxyamide)-2'-deoxyuridine
  misc_feature (21)..(23): n is 5-(N-benzylcarboxyamide)-2'-deoxyuridine
  misc_feature (25)..(25): n is 1,3-propane diol
nnacgacnacgnnacacgcgnnnanagcg

SEQ ID NO: 370 - DNA, 29 bp, Artificial Sequence
  Synthetic
  misc_feature (1)..(2): n is 5-(N-benzylcarboxyamide)-2'-deoxyuridine
  misc_feature (8)..(8): n is 5-(N-benzylcarboxyamide)-2'-deoxyuridine
  misc_feature (12)..(13): n is 5-(N-benzylcarboxyamide)-2'-deoxyuridine
  misc_feature (21)..(23): n is 5-(N-benzylcarboxyamide)-2'-deoxyuridine
  misc_feature (25)..(25): n is 5-(N-benzylcarboxyamide)-2'-deoxyuridine
  misc_feature (26)..(26): n is 1,3-propane diol
nnacgacnacgnnacacgcgnnnanngcg

SEQ ID NO: 371 - DNA, 29 bp, Artificial Sequence
  Synthetic
  misc_feature (1)..(2): n is 5-(N-benzylcarboxyamide)-2'-deoxyuridine
  misc_feature (8)..(8): n is 5-(N-benzylcarboxyamide)-2'-deoxyuridine
  misc_feature (12)..(13): n is 5-(N-benzylcarboxyamide)-2'-deoxyuridine
  misc_feature (21)..(23): n is 5-(N-benzylcarboxyamide)-2'-deoxyuridine
  misc_feature (25)..(25): n is 5-(N-benzylcarboxyamide)-2'-deoxyuridine
  misc_feature (27)..(27): n is 1,3-propane diol
nnacgacnacgnnacacgcgnnnanancg

SEQ ID NO: 372 - DNA, 29 bp, Artificial Sequence
  Synthetic
  misc_feature (1)..(2): n is 5-(N-benzylcarboxyamide)-2'-deoxyuridine
  misc_feature (3)..(3): n is 2'-O-methyl-adenosine
  misc_feature (6)..(6): n is 1,3-propane diol
  misc_feature (8)..(8): n is 1,3-propane diol
  misc_feature (9)..(9): n is 1,3-propane diol
  misc_feature (12)..(13): n is 5-(N-benzylcarboxyamide)-2'-deoxyuridine
  misc_feature (16)..(16): n is 2'-O-methyl-adenosine
  misc_feature (21)..(23): n is 5-(N-benzylcarboxyamide)-2'-deoxyuridine
  misc_feature (25)..(25): n is 5-(N-benzylcarboxyamide)-2'-deoxyuridine
  misc_feature (26)..(26): n is 2'-O-methyl-adenosine
  misc_feature (29)..(29): n is 2'-O-methyl-guanosine
nnncgncnncgnnacncgcgnnnanngcn

SEQ ID NO: 373 - DNA, 29 bp, Artificial Sequence
  Synthetic
  misc_feature (1)..(1): n is 5-(N-benzylcarboxyamide)-2'-deoxyuridine
  misc_feature (2)..(2): n is 2'-O-methyl-uridine
  misc_feature (8)..(8): n is 5-(N-benzylcarboxyamide)-2'-deoxyuridine
  misc_feature (12)..(13): n is 5-(N-benzylcarboxyamide)-2'-deoxyuridine
  misc_feature (21)..(23): n is 5-(N-benzylcarboxyamide)-2'-deoxyuridine
  misc_feature (25)..(25): n is 5-(N-benzylcarboxyamide)-2'-deoxyuridine
nnacgacnacgnnacacgcgnnnanagcg

SEQ ID NO: 374 - DNA, 29 bp, Artificial Sequence
  Synthetic
  misc_feature (1)..(2): n is 5-(N-benzylcarboxyamide)-2'-deoxyuridine
  misc_feature (8)..(8): n is 5-(N-benzylcarboxyamide)-2'-deoxyuridine
  misc_feature (12)..(12): n is 5-(N-benzylcarboxyamide)-2'-deoxyuridine
  misc_feature (13)..(13): n is 2'-O-methyl-uridine
  misc_feature (21)..(23): n is 5-(N-benzylcarboxyamide)-2'-deoxyuridine
  misc_feature (25)..(25): n is 5-(N-benzylcarboxyamide)-2'-deoxyuridine
nnacgacnacgnnacacgcgnnnanagcg

SEQ ID NO: 375 - DNA, 29 bp, Artificial Sequence
  Synthetic
  misc_feature (1)..(2): n is 5-(N-benzylcarboxyamide)-2'-deoxyuridine
  misc_feature (8)..(8): n is 5-(N-benzylcarboxyamide)-2'-deoxyuridine
  misc_feature (12)..(13): n is 5-(N-benzylcarboxyamide)-2'-deoxyuridine
  misc_feature (21)..(21): n is 2'-O-methyl-uridine
  misc_feature (22)..(23): n is 5-(N-benzylcarboxyamide)-2'-deoxyuridine
  misc_feature (25)..(25): n is 5-(N-benzylcarboxyamide)-2'-deoxyuridine
nnacgacnacgnnacacgcgnnnanagcg

SEQ ID NO: 376 - DNA, 29 bp, Artificial Sequence
  Synthetic
  misc_feature (1)..(2): n is 5-(N-benzylcarboxyamide)-2'-deoxyuridine
  misc_feature (8)..(8): n is 5-(N-benzylcarboxyamide)-2'-deoxyuridine
  misc_feature (12)..(13): n is 5-(N-benzylcarboxyamide)-2'-deoxyuridine
  misc_feature (21)..(21): n is 5-(N-benzylcarboxyamide)-2'-deoxyuridine
  misc_feature (22)..(22): n is 2'-O-methyl-uridine
  misc_feature (23)..(23): n is 5-(N-benzylcarboxyamide)-2'-deoxyuridine
  misc_feature (25)..(25): n is 5-(N-benzylcarboxyamide)-2'-deoxyuridine
nnacgacnacgnnacacgcgnnnanagcg

SEQ ID NO: 377 - DNA, 29 bp, Artificial Sequence
  Synthetic
  misc_feature (1)..(1): n is 5-[N-(1-naphthylmethyl)carboxyamide]-2'-deoxyuridine
  misc_feature (2)..(2): n is 5-(N-benzylcarboxyamide)-2'-deoxyuridine
  misc_feature (8)..(8): n is 5-(N-benzylcarboxyamide)-2'-deoxyuridine
  misc_feature (12)..(13): n is 5-(N-benzylcarboxyamide)-2'-deoxyuridine
  misc_feature (21)..(23): n is 5-(N-benzylcarboxyamide)-2'-deoxyuridine
  misc_feature (25)..(25): n is 2'-O-methyl-uridine
nnacgacnacgnnacacgcgnnnanagcg

SEQ ID NO: 378 - DNA, 25 bp, Artificial Sequence
  Synthetic
  misc_feature (1)..(1): n is 5-(N-benzylcarboxyamide)-2'-deoxyuridine
  misc_feature (2)..(2): n is 5-[N-(1-naphthylmethyl)carboxyamide]-2'-deoxyuridine
  misc_feature (5)..(6): n is hexaethylene glycol
  misc_feature (8)..(8): n is 2'-O-methyl-uridine
  misc_feature (9)..(9): n is 5-[N-(1-naphthylmethyl)carboxyamide]-2'-deoxyuridine
  misc_feature (17)..(18): n is 5-[N-(1-naphthylmethyl)carboxyamide]-2'-deoxyuridine
  misc_feature (19)..(19): n is 5-(N-benzylcarboxyamide)-2'-deoxyuridine
  misc_feature (21)..(21): n is 5-[N-(1-naphthylmethyl)carboxyamide]-2'-deoxyuridine
nnacnngnnacacgcgnnnanagcg

SEQ ID NO: 379 - DNA, 25 bp, Artificial Sequence
  Synthetic
  misc_feature (1)..(1): n is 5-(N-benzylcarboxyamide)-2'-deoxyuridine
  misc_feature (2)..(2): n is 5-[N-(1-naphthylmethyl)carboxyamide]-2'-deoxyuridine
  misc_feature (3)..(3): n is 2'-O-methyl-adenosine
  misc_feature (5)..(6): n is hexaethylene glycol
  misc_feature (8)..(8): n is 2'-O-methyl-uridine
  misc_feature (9)..(9): n is 5-[N-(1-naphthylmethyl)carboxyamide]-2'-deoxyuridine
  misc_feature (12)..(12): n is 2'-O-methyl-adenosine
  misc_feature (17)..(18): n is 5-[N-(1-naphthylmethyl)carboxyamide]-2'-deoxyuridine
  misc_feature (19)..(19): n is 5-(N-benzylcarboxyamide)-2'-deoxyuridine
  misc_feature (21)..(21): n is 5-[N-(1-naphthylmethyl)carboxyamide]-2'-deoxyuridine
  misc_feature (22)..(22): n is 2'-O-methyl-adenosine
  misc_feature (25)..(25): n is 2'-O-methyl-guanosine
nnncnngnnacncgcgnnnanngcn

SEQ ID NO: 380 - DNA, 23 bp, Artificial Sequence
  Synthetic
  misc_feature (1)..(2): n is 5-(N-benzylcarboxyamide)-2'-deoxyuridine
  misc_feature (6)..(7): n is 5-(N-benzylcarboxyamide)-2'-deoxyuridine
  misc_feature (15)..(17): n is 5-(N-benzylcarboxyamide)-2'-deoxyuridine
  misc_feature (19)..(19): n is 5-(N-benzylcarboxyamide)-2'-deoxyuridine
nnacgnnacacgcgnnnanagcg

SEQ ID NO: 381 - DNA, 24 bp, Artificial Sequence
  Synthetic
  misc_feature (1)..(2): n is 5-(N-benzylcarboxyamide)-2'-deoxyuridine
  misc_feature (3)..(3): n is 2'-O-methyl-adenosine
  misc_feature (5)..(5): n is hexaethylene glycol
  misc_feature (7)..(7): n is 5-(N-benzylcarboxyamide)-2'-deoxyuridine
  misc_feature (8)..(8): n is 5-[N-(3-indole-2-ethyl)-carboxyamide]-2'-deoxyuridine
  misc_feature (11)..(11): n is 2'-O-methyl-adenosine
  misc_feature (16)..(18): n is 5-(N-benzylcarboxyamide)-2'-deoxyuridine
  misc_feature (20)..(20): n is 5-(N-benzylcarboxyamide)-2'-deoxyuridine
  misc_feature (21)..(21): n is 2'-O-methyl-adenosine
  misc_feature (24)..(24): n is 2'-O-methyl-guanosine
nnncngnnacncgcgnnnanngcn

SEQ ID NO: 382 - DNA, 24 bp, Artificial Sequence
  Synthetic
  misc_feature (1)..(2): n is 5-(N-benzylcarboxyamide)-2'-deoxyuridine
  misc_feature (3)..(3): n is 2'-O-methyl-adenosine
  misc_feature (5)..(5): n is hexaethylene glycol
  misc_feature (7)..(8): n is 5-(N-benzylcarboxyamide)-2'-deoxyuridine
  misc_feature (11)..(11): n is 2'-O-methyl-adenosine
  misc_feature (16)..(16): n is 5-[N-(3-indole-2-ethyl)-carboxyamide]-2'-deoxyuridine
  misc_feature (17)..(18): n is 5-(N-benzylcarboxyamide)-2'-deoxyuridine
  misc_feature (20)..(20): n is 5-(N-benzylcarboxyamide)-2'-deoxyuridine
  misc_feature (21)..(21): n is 2'-O-methyl-adenosine
  misc_feature (24)..(24): n is 2'-O-methyl-guanosine
nnncngnnacncgcgnnnanngcn

SEQ ID NO: 383 - DNA, 24 bp, Artificial Sequence
  Synthetic
  misc_feature (1)..(2): n is 5-(N-benzylcarboxyamide)-2'-deoxyuridine
  misc_feature (3)..(3): n is 2'-O-methyl-adenosine
  misc_feature (5)..(5): n is hexaethylene glycol
  misc_feature (7)..(8): n is 5-(N-benzylcarboxyamide)-2'-deoxyuridine
  misc_feature (11)..(11): n is 2'-O-methyl-adenosine
  misc_feature (16)..(16): n is 5-(N-benzylcarboxyamide)-2'-deoxyuridine
  misc_feature (17)..(17): n is 5-[N-(3-indole-2-ethyl)-carboxyamide]-2'-deoxyuridine
  misc_feature (18)..(18): n is 5-(N-benzylcarboxyamide)-2'-deoxyuridine
  misc_feature (20)..(20): n is 5-(N-benzylcarboxyamide)-2'-deoxyuridine
  misc_feature (21)..(21): n is 2'-O-methyl-adenosine
  misc_feature (24)..(24): n is 2'-O-methyl-guanosine
nnncngnnacncgcgnnnanngcn

SEQ ID NO: 384 - DNA, 24 bp, Artificial Sequence
  Synthetic
  misc_feature (1)..(2): n is 5-(N-benzylcarboxyamide)-2'-deoxyuridine
  misc_feature (3)..(3): n is 2'-O-methyl-adenosine
  misc_feature (5)..(5): n is hexaethylene glycol
  misc_feature (7)..(7): n is 5-(N-benzylcarboxyamide)-2'-deoxyuridine
  misc_feature (8)..(8): n is 5-[N-(2-naphthylmethyl)carboxyamide]-2'-deoxyuridine
  misc_feature (11)..(11): n is 2'-O-methyl-adenosine
  misc_feature (16)..(18): n is 5-(N-benzylcarboxyamide)-2'-deoxyuridine
  misc_feature (20)..(20): n is 5-(N-benzylcarboxyamide)-2'-deoxyuridine
  misc_feature (21)..(21): n is 2'-O-methyl-adenosine
  misc_feature (24)..(24): n is 2'-O-methyl-guanosine
nnncngnnacncgcgnnnanngcn

SEQ ID NO: 385 - DNA, 24 bp, Artificial Sequence
  Synthetic
  misc_feature (1)..(2): n is 5-(N-benzylcarboxyamide)-2'-deoxyuridine
  misc_feature (3)..(3): n is 2'-O-methyl-adenosine
  misc_feature (5)..(5): n is hexaethylene glycol
  misc_feature (7)..(8): n is 5-(N-benzylcarboxyamide)-2'-deoxyuridine
  misc_feature (11)..(11): n is 2'-O-methyl-adenosine
  misc_feature (16)..(16): n is 5-(N-benzylcarboxyamide)-2'-deoxyuridine
  misc_feature (17)..(17): n is 5-[N-(2-naphthyl-2-ethyl)carboxyamide]-2'-deoxyuridine
  misc_feature (18)..(18): n is 5-(N-benzylcarboxyamide)-2'-deoxyuridine
  misc_feature (20)..(20): n is 5-(N-benzylcarboxyamide)-2'-deoxyuridine
  misc_feature (21)..(21): n is 2'-O-methyl-adenosine
  misc_feature (24)..(24): n is 2'-O-methyl-guanosine
nnncngnnacncgcgnnnanngcn

SEQ ID NO: 386 - DNA, 24 bp, Artificial Sequence
  Synthetic
  misc_feature (1)..(2): n is 5-(N-benzylcarboxyamide)-2'-deoxyuridine
  misc_feature (3)..(3): n is 2'-O-methyl-adenosine
  misc_feature (5)..(5): n is hexaethylene glycol
  misc_feature (7)..(8): n is 5-(N-benzylcarboxyamide)-2'-deoxyuridine
  misc_feature (9)..(9): n is 2'-O-methyl-adenosine
  misc_feature (11)..(11): n is 2'-O-methyl-adenosine
  misc_feature (16)..(18): n is 5-(N-benzylcarboxyamide)-2'-deoxyuridine
  misc_feature (20)..(20): n is 5-(N-benzylcarboxyamide)-2'-deoxyuridine
  misc_feature (21)..(21): n is 2'-O-methyl-adenosine
  misc_feature (24)..(24): n is 2'-O-methyl-guanosine
nnncngnnncncgcgnnnanngcn

SEQ ID NO: 387 - DNA, 24 bp, Artificial Sequence
  Synthetic
  misc_feature (1)..(1): n is 5-[N-(4-hydroxyphenyl-2-ethyl)carboxyamide]-2'-deoxyuridine
  misc_feature (2)..(2): n is 5-[N-(3,4-methylenedioxyphenyl-methyl)carboxyamide]-2'-deoxyuridi ne
  misc_feature (3)..(3): n is 2'-O-methyl-adenosine
  misc_feature (5)..(5): n is hexaethylene glycol
  misc_feature (7)..(7): n is 5-[N-(4-fluorobenzyl)carboxyamide]-2'-deoxyuridine
  misc_feature (8)..(8): n is 5-[N-isobutyl-carboxyamide]-2'-deoxyuridine
  misc_feature (11)..(11): n is 2'-O-methyl-adenosine
  misc_feature (16)..(16): n is 5-[N-(2-naphthylmethyl)carboxyamide]-2'-deoxyuridine
  misc_feature (17)..(17): n is 5-[N-(phenyl-2-ethyl)-carboxyamide]-2'-deoxyuridine
  misc_feature (18)..(18): n is 5-[N-(2-thiophene-methyl)carboxyamide]-2'-deoxyuridine
  misc_feature (20)..(20): n is 5-[N-(1-naphthyl-2-ethyl)carboxyamide]-2'-deoxyuridine
  misc_feature (21)..(21): n is 2'-O-methyl-adenosine
  misc_feature (24)..(24): n is 2'-O-methyl-guanosine
nnncngnnacncgcgnnnanngcn

SEQ ID NO: 388 - DNA, 24 bp, Artificial Sequence
  Synthetic
  misc_feature (1)..(1): n is 5-[N-(4-hydroxyphenyl-2-ethyl)carboxyamide]-2'-deoxyuridine
  misc_feature (2)..(2): n is 5-[N-(3,4-methylenedioxyphenyl-methyl)carboxyamide]-2'-deoxyuridi ne
  misc_feature (3)..(3): n is 2'-O-methyl-adenosine
  misc_feature (5)..(5): n is hexaethylene glycol
  misc_feature (7)..(7): n is 5-[N-(4-fluorobenzyl)carboxyamide]-2'-deoxyuridine
  misc_feature (8)..(8): n is 5-[N-isobutyl-carboxyamide]-2'-deoxyuridine
  misc_feature (11)..(11): n is 2'-O-methyl-adenosine
  misc_feature (12)..(12): n is 2'-O-methyl-cytidine
  misc_feature (16)..(16): n is 5-[N-(2-naphthylmethyl)carboxyamide]-2'-deoxyuridine
  misc_feature (17)..(17): n is 5-[N-(phenyl-2-ethyl)-carboxyamide]-2'-deoxyuridine
  misc_feature (18)..(18): n is 5-[N-(2-thiophene-methyl)carboxyamide]-2'-deoxyuridine
  misc_feature (19)..(19): n is 2'-O-methyl-adenosine
  misc_feature (20)..(20): n is 5-[N-(1-naphthyl-2-ethyl)carboxyamide]-2'-deoxyuridine
  misc_feature (21)..(21): n is 2'-O-methyl-adenosine
  misc_feature (22)..(22): n is 2'-O-methyl-guanosine
  misc_feature (24)..(24): n is 2'-O-methyl-guanosine
nnncngnnacnngcgnnnnnnncn

SEQ ID NO: 389 - DNA, 24 bp, Artificial Sequence
  Synthetic
  misc_feature (1)..(1): n is 5-[N-(3-indole-2-ethyl)-carboxyamide]-2'-deoxyuridine
  misc_feature (2)..(2): n is 5-[N-isobutyl-carboxyamide]-2'-deoxyuridine
  misc_feature (3)..(3): n is 2'-O-methyl-adenosine
  misc_feature (5)..(5): n is hexaethylene glycol
  misc_feature (7)..(7): n is 5-[N-(1-naphthyl-2-ethyl)carboxyamide]-2'-deoxyuridine
  misc_feature (8)..(8): n is 5-[N-isobutyl-carboxyamide]-2'-deoxyuridine
  misc_feature (11)..(11): n is 2'-O-methyl-adenosine
  misc_feature (16)..(16): n is 5-[N-(2-thiophene-methyl)carboxyamide]-2'-deoxyuridine
  misc_feature (17)..(17): n is 5-[N-(phenyl-2-ethyl)-carboxyamide]-2'-deoxyuridine
  misc_feature (18)..(18): n is 5-[N-(2-thiophene-methyl)carboxyamide]-2'-deoxyuridine
  misc_feature (20)..(20): n is 5-[N-(3,4-methylenedioxyphenyl-methyl)carboxyamide]-2'-deoxyuridi ne
  misc_feature (21)..(21): n is 2'-O-methyl-adenosine
  misc_feature (24)..(24): n is 2'-O-methyl-guanosine
nnncngnnacncgcgnnnanngcn

SEQ ID NO: 390 - DNA, 24 bp, Artificial Sequence
  Synthetic
  misc_feature (1)..(1): n is 5-[N-(3-indole-2-ethyl)-carboxyamide]-2'-deoxyuridine
  misc_feature (2)..(2): n is 5-[N-isobutyl-carboxyamide]-2'-deoxyuridine
  misc_feature (3)..(3): n is 2'-O-methyl-adenosine
  misc_feature (5)..(5): n is hexaethylene glycol
  misc_feature (7)..(7): n is 5-[N-(1-naphthyl-2-ethyl)carboxyamide]-2'-deoxyuridine
  misc_feature (8)..(8): n is 5-[N-isobutyl-carboxyamide]-2'-deoxyuridine
  misc_feature (11)..(11): n is 2'-O-methyl-adenosine
  misc_feature (12)..(12): n is 2'-O-methyl-cytidine
  misc_feature (16)..(16): n is 5-[N-(2-thiophene-methyl)carboxyamide]-2'-deoxyuridine
  misc_feature (17)..(17): n is 5-[N-(phenyl-2-ethyl)-carboxyamide]-2'-deoxyuridine
  misc_feature (18)..(18): n is 5-[N-(2-thiophene-methyl)carboxyamide]-2'-deoxyuridine
  misc_feature (19)..(19): n is 2'-O-methyl-adenosine
  misc_feature (20)..(20): n is 5-[N-(3,4-methylenedioxyphenyl-methyl)carboxyamide]-2'-deoxyuridi ne
  misc_feature (21)..(21): n is 2'-O-methyl-adenosine
  misc_feature (22)..(22): n is 2'-O-methyl-guanosine
  misc_feature (24)..(24): n is 2'-O-methyl-guanosine
nnncngnnacnngcgnnnnnnncn

SEQ ID NO: 391 - DNA, 24 bp, Artificial Sequence
  Synthetic
  misc_feature (1)..(2): n is 5-(N-benzylcarboxyamide)-2'-deoxyuridine
  misc_feature (3)..(3): n is 2'-O-methyl-adenosine
  misc_feature (5)..(5): n is hexaethylene glycol
  misc_feature (7)..(7): n is 2'-O-methyl-uridine
  misc_feature (8)..(8): n is 5-[N-isobutyl-carboxyamide]-2'-deoxyuridine
  misc_feature (11)..(11): n is 2'-O-methyl-adenosine
  misc_feature (16)..(18): n is 5-(N-benzylcarboxyamide)-2'-deoxyuridine
  misc_feature (20)..(20): n is 5-(N-benzylcarboxyamide)-2'-deoxyuridine
  misc_feature (21)..(21): n is 2'-O-methyl-adenosine
  misc_feature (24)..(24): n is 2'-O-methyl-guanosine
nnncngnnacncgcgnnnanngcn

SEQ ID NO: 392 - DNA, 24 bp, Artificial Sequence
  Synthetic
  misc_feature (1)..(2): n is 5-(N-benzylcarboxyamide)-2'-deoxyuridine
  misc_feature (3)..(3): n is 2'-O-methyl-adenosine
  misc_feature (5)..(5): n is hexaethylene glycol
  misc_feature (7)..(7): n is 5-[N-(4-fluorobenzyl)carboxyamide]-2'-deoxyuridine
  misc_feature (8)..(8): n is 5-[N-isobutyl-carboxyamide]-2'-deoxyuridine
  misc_feature (11)..(11): n is 2'-O-methyl-adenosine
  misc_feature (16)..(16): n is 5-(N-benzylcarboxyamide)-2'-deoxyuridine
  misc_feature (17)..(17): n is 5-[N-(phenyl-2-ethyl)-carboxyamide]-2'-deoxyuridine
  misc_feature (18)..(18): n is 5-[N-(2-thiophene-methyl)carboxyamide]-2'-deoxyuridine
  misc_feature (20)..(20): n is 5-(N-benzylcarboxyamide)-2'-deoxyuridine
  misc_feature (21)..(21): n is 2'-O-methyl-adenosine
  misc_feature (24)..(24): n is 2'-O-methyl-guanosine
nnncngnnacncgcgnnnanngcn

SEQ ID NO: 393 - DNA, 24 bp, Artificial Sequence
  Synthetic
  misc_feature (1)..(1): n is 5-[N-(4-hydroxyphenyl-2-ethyl)carboxyamide]-2'-deoxyuridine
  misc_feature (2)..(2): n is 5-(N-benzylcarboxyamide)-2'-deoxyuridine
  misc_feature (3)..(3): n is 2'-O-methyl-adenosine
  misc_feature (5)..(5): n is hexaethylene glycol
  misc_feature (7)..(7): n is 5-(N-benzylcarboxyamide)-2'-deoxyuridine
  misc_feature (8)..(8): n is 5-[N-isobutyl-carboxyamide]-2'-deoxyuridine
  misc_feature (11)..(11): n is 2'-O-methyl-adenosine
  misc_feature (16)..(16): n is 5-(N-benzylcarboxyamide)-2'-deoxyuridine
  misc_feature (17)..(17): n is 5-[N-(phenyl-2-ethyl)-carboxyamide]-2'-deoxyuridine
  misc_feature (18)..(18): n is 5-[N-(2-thiophene-methyl)carboxyamide]-2'-deoxyuridine
  misc_feature (20)..(20): n is 5-(N-benzylcarboxyamide)-2'-deoxyuridine
  misc_feature (21)..(21): n is 2'-O-methyl-adenosine
  misc_feature (24)..(24): n is 2'-O-methyl-guanosine
nnncngnnacncgcgnnnanngcn

SEQ ID NO: 394 - DNA, 24 bp, Artificial Sequence
  Synthetic
  misc_feature (1)..(1): n is 5-[N-(4-hydroxyphenyl-2-ethyl)carboxyamide]-2'-deoxyuridine
  misc_feature (2)..(2): n is 5-(N-benzylcarboxyamide)-2'-deoxyuridine
  misc_feature (3)..(3): n is 2'-O-methyl-adenosine
  misc_feature (5)..(5): n is hexaethylene glycol
  misc_feature (7)..(7): n is 5-[N-(4-fluorobenzyl)carboxyamide]-2'-deoxyuridine
  misc_feature (8)..(8): n is 5-[N-isobutyl-carboxyamide]-2'-deoxyuridine
  misc_feature (11)..(11): n is 2'-O-methyl-adenosine
  misc_feature (16)..(16): n is 5-[N-(2-naphthylmethyl)carboxyamide]-2'-deoxyuridine
  misc_feature (17)..(17): n is 5-[N-(phenyl-2-ethyl)-carboxyamide]-2'-deoxyuridine
  misc_feature (18)..(18): n is 5-[N-(2-thiophene-methyl)carboxyamide]-2'-deoxyuridine
  misc_feature (20)..(20): n is 5-(N-benzylcarboxyamide)-2'-deoxyuridine
  misc_feature (21)..(21): n is 2'-O-methyl-adenosine
  misc_feature (24)..(24): n is 2'-O-methyl-guanosine
nnncngnnacncgcgnnnanngcn

SEQ ID NO: 395 - DNA, 23 bp, Artificial Sequence
  Synthetic
  misc_feature (1)..(2): n is 5-(N-benzylcarboxyamide)-2'-deoxyuridine
  misc_feature (3)..(3): n is 2'-O-methyl-adenosine
  misc_feature (5)..(5): n is 1,3-propane diol
  misc_feature (7)..(8): n is 5-(N-benzylcarboxyamide)-2'-deoxyuridine
  misc_feature (11)..(11): n is 1,3-propane diol
  misc_feature (15)..(17): n is 5-(N-benzylcarboxyamide)-2'-deoxyuridine
  misc_feature (19)..(19): n is 5-(N-benzylcarboxyamide)-2'-deoxyuridine
  misc_feature (20)..(20): n is 2'-O-methyl-adenosine
  misc_feature (23)..(23): n is 2'-O-methyl-guanosine
nnncngnnacngcgnnnanngcn

SEQ ID NO: 396 - DNA, 24 bp, Artificial Sequence
  Synthetic
  misc_feature (1)..(1): n is 5-(N-benzylcarboxyamide)-2'-O-methyl-uridine
  misc_feature (2)..(2): n is 5-(N-benzylcarboxyamide)-2'-deoxyuridine
  misc_feature (3)..(3): n is 2'-O-methyl-adenosine
  misc_feature (5)..(5): n is hexaethylene glycol
  misc_feature (7)..(8): n is 5-(N-benzylcarboxyamide)-2'-deoxyuridine
  misc_feature (11)..(11): n is 2'-O-methyl-adenosine
  misc_feature (16)..(18): n is 5-(N-benzylcarboxyamide)-2'-deoxyuridine
  misc_feature (20)..(20): n is 5-(N-benzylcarboxyamide)-2'-deoxyuridine
  misc_feature (21)..(21): n is 2'-O-methyl-adenosine
  misc_feature (24)..(24): n is 2'-O-methyl-guanosine
nnncngnnacncgcgnnnanngcn

SEQ ID NO: 397 - DNA, 24 bp, Artificial Sequence
  Synthetic
  misc_feature (1)..(1): n is 5-(N-benzylcarboxyamide)-2'-deoxyuridine
  misc_feature (2)..(2): n is 5-(N-benzylcarboxyamide)-2'-O-methyl-uridine
  misc_feature (3)..(3): n is 2'-O-methyl-adenosine
  misc_feature (5)..(5): n is hexaethylene glycol
  misc_feature (7)..(8): n is 5-(N-benzylcarboxyamide)-2'-deoxyuridine
  misc_feature (11)..(11): n is 2'-O-methyl-adenosine
  misc_feature (16)..(18): n is 5-(N-benzylcarboxyamide)-2'-deoxyuridine
  misc_feature (20)..(20): n is 5-(N-benzylcarboxyamide)-2'-deoxyuridine
  misc_feature (21)..(21): n is 2'-O-methyl-adenosine
  misc_feature (24)..(24): n is 2'-O-methyl-guanosine
nnncngnnacncgcgnnnanngcn

SEQ ID NO: 398 - DNA, 24 bp, Artificial Sequence
  Synthetic
  misc_feature (1)..(2): n is 5-(N-benzylcarboxyamide)-2'-deoxyuridine
  misc_feature (3)..(3): n is 2'-O-methyl-adenosine
  misc_feature (5)..(5): n is hexaethylene glycol
  misc_feature (7)..(8): n is 5-(N-benzylcarboxyamide)-2'-deoxyuridine
  misc_feature (11)..(11): n is 2'-O-methyl-adenosine
  misc_feature (16)..(16): n is 5-(N-benzylcarboxyamide)-2'-O-methyl-uridine
  misc_feature (17)..(18): n is 5-(N-benzylcarboxyamide)-2'-deoxyuridine
  misc_feature (20)..(20): n is 5-(N-benzylcarboxyamide)-2'-deoxyuridine
  misc_feature (21)..(21): n is 2'-O-methyl-adenosine
  misc_feature (24)..(24): n is 2'-O-methyl-guanosine
nnncngnnacncgcgnnnanngcn

SEQ ID NO: 399 - DNA, 24 bp, Artificial Sequence
  Synthetic
  misc_feature (1)..(2): n is5-(N-benzylcarboxyamide)-2'-deoxyuridine
  misc_feature (3)..(3): n is 2'-O-methyl-adenosine
  misc_feature (5)..(5): n is hexaethylene glycol
  misc_feature (7)..(8): n is5-(N-benzylcarboxyamide)-2'-deoxyuridine
  misc_feature (11)..(11): n is 2'-O-methyl-adenosine
  misc_feature (16)..(16): n is5-(N-benzylcarboxyamide)-2'-deoxyuridine
  misc_feature (17)..(17): n is 5-(N-benzylcarboxyamide)-2'-O-methyl-uridine
  misc_feature (18)..(18): n is5-(N-benzylcarboxyamide)-2'-deoxyuridine
  misc_feature (20)..(20): n is5-(N-benzylcarboxyamide)-2'-deoxyuridine
  misc_feature (21)..(21): n is 2'-O-methyl-adenosine
  misc_feature (24)..(24): n is 2'-O-methyl-guanosine
nnncngnnacncgcgnnnanngcn

SEQ ID NO: 400 - DNA, 24 bp, Artificial Sequence
  Synthetic
  misc_feature (1)..(2): n is 5-(N-benzylcarboxyamide)-2'-deoxyuridine
  misc_feature (3)..(3): n is 2'-O-methyl-adenosine
  misc_feature (5)..(5): n is hexaethylene glycol
  misc_feature (7)..(7): n is 5-(N-benzylcarboxyamide)-2'-O-methyl-uridine
  misc_feature (8)..(8): n is 5-(N-benzylcarboxyamide)-2'-deoxyuridine
  misc_feature (9)..(9): n is 2'-fluoro-2'-deoxyadenosine
  misc_feature (11)..(11): n is 2'-O-methyl-adenosine
  misc_feature (12)..(12): n is 2'-O-methyl-cytidine
  misc_feature (16)..(16): n is 5-(N-benzylcarboxyamide)-2'-deoxyuridine
  misc_feature (17)..(17): n is 5-[N-(phenyl-2-ethyl)-carboxyamide]-2'-deoxyuridine
  misc_feature (18)..(18): n is 5-(N-benzylcarboxyamide)-2'-O-methyl-uridine
  misc_feature (19)..(19): n is 2'-O-methyl-adenosine
  misc_feature (20)..(20): n is 5-(N-benzylcarboxyamide)-2'-deoxyuridine
  misc_feature (21)..(21): n is 2'-O-methyl-adenosine
  misc_feature (24)..(24): n is 2'-O-methyl-guanosine
nnncngnnncnngcgnnnnnngcn

SEQ ID NO: 401 - DNA, 24 bp, Artificial Sequence
  Synthetic
  misc_feature (1)..(2): n is 5-(N-benzylcarboxyamide)-2'-deoxyuridine
  misc_feature (3)..(3): n is 2'-O-methyl-adenosine
  misc_feature (5)..(5): n is hexaethylene glycol
  misc_feature (7)..(7): n is 5-(N-benzylcarboxyamide)-2'-O-methyl-uridine
  misc_feature (8)..(8): n is 5-(N-benzylcarboxyamide)-2'-deoxyuridine
  misc_feature (10)..(10): n is 2'-fluoro-2'-deoxycytidine
  misc_feature (11)..(11): n is 2'-O-methyl-adenosine
  misc_feature (12)..(12): n is 2'-O-methyl-cytidine
  misc_feature (16)..(16): n is 5-(N-benzylcarboxyamide)-2'-deoxyuridine
  misc_feature (17)..(17): n is 5-[N-(phenyl-2-ethyl)-carboxyamide]-2'-deoxyuridine
  misc_feature (18)..(18): n is 5-(N-benzylcarboxyamide)-2'-O-methyl-uridine
  misc_feature (19)..(19): n is 2'-O-methyl-adenosine
  misc_feature (20)..(20): n is 5-(N-benzylcarboxyamide)-2'-deoxyuridine
  misc_feature (21)..(21): n is 2'-O-methyl-adenosine
  misc_feature (24)..(24): n is 2'-O-methyl-guanosine
nnncngnnannngcgnnnnnngcn

SEQ ID NO: 402 - DNA, 24 bp, Artificial Sequence
  Synthetic
  misc_feature (1)..(2): n is 5-(N-benzylcarboxyamide)-2'-deoxyuridine
  misc_feature (3)..(3): n is 2'-O-methyl-adenosine
  misc_feature (5)..(5): n is hexaethylene glycol
  misc_feature (7)..(7): n is 5-(N-benzylcarboxyamide)-2'-O-methyl-uridine
  misc_feature (8)..(8): n is 5-(N-benzylcarboxyamide)-2'-deoxyuridine
  misc_feature (11)..(11): n is 2'-O-methyl-adenosine
  misc_feature (12)..(12): n is 2'-O-methyl-cytidine
  misc_feature (14)..(14): n is 2'-fluoro-2'-deoxycytidine
  misc_feature (16)..(16): n is 5-(N-benzylcarboxyamide)-2'-deoxyuridine
  misc_feature (17)..(17): n is 5-[N-(phenyl-2-ethyl)-carboxyamide]-2'-deoxyuridine
  misc_feature (18)..(18): n is 5-(N-benzylcarboxyamide)-2'-O-methyl-uridine
  misc_feature (19)..(19): n is 2'-O-methyl-adenosine
  misc_feature (20)..(20): n is 5-(N-benzylcarboxyamide)-2'-deoxyuridine
  misc_feature (21)..(21): n is 2'-O-methyl-adenosine
  misc_feature (24)..(24): n is 2'-O-methyl-guanosine
nnncngnnacnngngnnnnnngcn

SEQ ID NO: 403 - DNA, 24 bp, Artificial Sequence
  Synthetic
  misc_feature (1)..(2): n is 5-(N-benzylcarboxyamide)-2'-deoxyuridine
  misc_feature (3)..(3): n is 2'-O-methyl-adenosine
  misc_feature (5)..(5): n is hexaethylene glycol
  misc_feature (7)..(7): n is 5-(N-benzylcarboxyamide)-2'-deoxyuridine
  misc_feature (11)..(11): n is 2'-O-methyl-adenosine
  misc_feature (16)..(18): n is 5-(N-benzylcarboxyamide)-2'-deoxyuridine
  misc_feature (20)..(20): n is 5-(N-benzylcarboxyamide)-2'-deoxyuridine
  misc_feature (21)..(21): n is 2'-O-methyl-adenosine
  misc_feature (24)..(24): n is 2'-O-methyl-guanosine
nnncngntacncgcgnnnanngcn

SEQ ID NO: 404 - DNA, 24 bp, Artificial Sequence
  Synthetic
  misc_feature (1)..(2): n is 5-(N-benzylcarboxyamide)-2'-deoxyuridine
  misc_feature (3)..(3): n is 2'-O-methyl-adenosine
  misc_feature (5)..(5): n is hexaethylene glycol
  misc_feature (7)..(8): n is 5-(N-benzylcarboxyamide)-2'-deoxyuridine
  misc_feature (11)..(11): n is 2'-O-methyl-adenosine
  misc_feature (17)..(18): n is 5-(N-benzylcarboxyamide)-2'-deoxyuridine
  misc_feature (20)..(20): n is 5-(N-benzylcarboxyamide)-2'-deoxyuridine
  misc_feature (21)..(21): n is 2'-O-methyl-adenosine
  misc_feature (24)..(24): n is 2'-O-methyl-guanosine
nnncngnnacncgcgtnnanngcn

SEQ ID NO: 405 - DNA, 24 bp, Artificial Sequence
  Synthetic
  misc_feature (1)..(2): n is 5-(N-benzylcarboxyamide)-2'-deoxyuridine
  misc_feature (3)..(3): n is 2'-O-methyl-adenosine
  misc_feature (5)..(5): n is hexaethylene glycol
  misc_feature (7)..(8): n is 5-(N-benzylcarboxyamide)-2'-deoxyuridine
  misc_feature (11)..(11): n is 2'-O-methyl-adenosine
  misc_feature (16)..(16): n is 5-(N-benzylcarboxyamide)-2'-deoxyuridine
  misc_feature (18)..(18): n is 5-(N-benzylcarboxyamide)-2'-deoxyuridine
  misc_feature (20)..(20): n is 5-(N-benzylcarboxyamide)-2'-deoxyuridine
  misc_feature (21)..(21): n is 2'-O-methyl-adenosine
  misc_feature (24)..(24): n is 2'-O-methyl-guanosine
nnncngnnacncgcgntnanngcn

SEQ ID NO: 406 - DNA, 24 bp, Artificial Sequence
  Synthetic
  misc_feature (1)..(2): n is 5-(N-benzylcarboxyamide)-2'-deoxyuridine
  misc_feature (3)..(3): n is 2'-O-methyl-adenosine
  misc_feature (5)..(5): n is hexaethylene glycol
  misc_feature (7)..(8): n is 5-(N-benzylcarboxyamide)-2'-deoxyuridine
  misc_feature (11)..(11): n is 2'-O-methyl-adenosine
  misc_feature (16)..(17): n is 5-(N-benzylcarboxyamide)-2'-deoxyuridine
  misc_feature (20)..(20): n is 5-(N-benzylcarboxyamide)-2'-deoxyuridine
  misc_feature (21)..(21): n is 2'-O-methyl-adenosine
  misc_feature (24)..(24): n is 2'-O-methyl-guanosine
nnncngnnacncgcgnntanngcn

SEQ ID NO: 407 - DNA, 24 bp, Artificial Sequence
  Synthetic
  misc_feature (1)..(2): n is 5-(N-benzylcarboxyamide)-2'-deoxyuridine
  misc_feature (3)..(3): n is 2'-O-methyl-adenosine
  misc_feature (5)..(5): n is hexaethylene glycol
  misc_feature (7)..(8): n is 5-(N-benzylcarboxyamide)-2'-deoxyuridine
  misc_feature (11)..(11): n is 2'-O-methyl-adenosine
  misc_feature (16)..(18): n is 5-(N-benzylcarboxyamide)-2'-deoxyuridine
  misc_feature (21)..(21): n is 2'-O-methyl-adenosine
  misc_feature (24)..(24): n is 2'-O-methyl-guanosine
nnncngnnacncgcgnnnatngcn

SEQ ID NO: 408 - DNA, 20 bp, Artificial Sequence
  Synthetic
  misc_feature (1)..(2): n is 5-(N-benzylcarboxyamide)-2'-deoxyuridine
  misc_feature (5)..(5): n is hexaethylene glycol
  misc_feature (7)..(8): n is 5-(N-benzylcarboxyamide)-2'-deoxyuridine
  misc_feature (11)..(11): n is 1,3-propane diol
  misc_feature (14)..(16): n is 5-(N-benzylcarboxyamide)-2'-deoxyuridine
  misc_feature (18)..(18): n is 5-(N-benzylcarboxyamide)-2'-deoxyuridine
nnacngnnacncgnnnanag

SEQ ID NO: 409 - DNA, 24 bp, Artificial Sequence
  Synthetic
  misc_feature (1)..(1): n is 5-(N-benzylcarboxyamide)-2'-deoxyuridine
  misc_feature (2)..(2): n is 5-[N-(3,4-methylenedioxyphenyl-methyl)carboxyamide]-2'-deoxyuridi ne
  misc_feature (3)..(3): n is 2'-O-methyl-adenosine
  misc_feature (5)..(5): n is hexaethylene glycol
  misc_feature (7)..(7): n is 5-(N-benzylcarboxyamide)-2'-O-methyl-uridine
  misc_feature (8)..(8): n is 5-(N-benzylcarboxyamide)-2'-deoxyuridine
  misc_feature (9)..(9): n is 2'-O-methyl-adenosine
  misc_feature (11)..(11): n is 1,3-propane diol
  misc_feature (12)..(12): n is 2'-O-methyl-cytidine
  misc_feature (15)..(15): n is 2'-O-methyl-guanosine
  misc_feature (16)..(17): n is 5-(N-benzylcarboxyamide)-2'-deoxyuridine
  misc_feature (18)..(18): n is 5-(N-benzylcarboxyamide)-2'-O-methyl-uridine
  misc_feature (19)..(19): n is 2'-O-methyl-adenosine
  misc_feature (20)..(20): n is 5-(N-benzylcarboxyamide)-2'-deoxyuridine
  misc_feature (21)..(21): n is 2'-O-methyl-adenosine
  misc_feature (24)..(24): n is 2'-O-methyl-guanosine
nnncngnnncnngcnnnnnnngcn

SEQ ID NO: 410 - DNA, 50 bp, Artificial Sequence
  Synthetic
  misc_feature (6)..(6): n is 5-[N-(1-naphthylmethyl)carboxyamide]-2'-deoxyuridine
  misc_feature (15)..(15): n is 5-[N-(1-naphthylmethyl)carboxyamide]-2'-deoxyuridine
  misc_feature (17)..(17): n is 5-[N-(1-naphthylmethyl)carboxyamide]-2'-deoxyuridine
  misc_feature (19)..(19): n is 5-[N-(1-naphthylmethyl)carboxyamide]-2'-deoxyuridine
  misc_feature (25)..(25): n is 5-[N-(1-naphthylmethyl)carboxyamide]-2'-deoxyuridine
  misc_feature (27)..(27): n is 5-[N-(1-naphthylmethyl)carboxyamide]-2'-deoxyuridine
  misc_feature (34)..(34): n is 5-[N-(1-naphthylmethyl)carboxyamide]-2'-deoxyuridine
  misc_feature (41)..(41): n is 5-[N-(1-naphthylmethyl)carboxyamide]-2'-deoxyuridine
  misc_feature (45)..(45): n is 5-[N-(1-naphthylmethyl)carboxyamide]-2'-deoxyuridine
ctgccncgacagcangnangcacancnagaggcnacccagngaangagga

SEQ ID NO: 411 - DNA, 47 bp, Artificial Sequence
  Synthetic
  misc_feature (3)..(3): n is 5-[N-(1-naphthylmethyl)carboxyamide]-2'-deoxyuridine
  misc_feature (12)..(12): n is 5-[N-(1-naphthylmethyl)carboxyamide]-2'-deoxyuridine
  misc_feature (14)..(14): n is 5-[N-(1-naphthylmethyl)carboxyamide]-2'-deoxyuridine
  misc_feature (16)..(16): n is 5-[N-(1-naphthylmethyl)carboxyamide]-2'-deoxyuridine
  misc_feature (22)..(22): n is 5-[N-(1-naphthylmethyl)carboxyamide]-2'-deoxyuridine
  misc_feature (24)..(24): n is 5-[N-(1-naphthylmethyl)carboxyamide]-2'-deoxyuridine
  misc_feature (31)..(31): n is 5-[N-(1-naphthylmethyl)carboxyamide]-2'-deoxyuridine
  misc_feature (38)..(38): n is 5-[N-(1-naphthylmethyl)carboxyamide]-2'-deoxyuridine
  misc_feature (42)..(42): n is 5-[N-(1-naphthylmethyl)carboxyamide]-2'-deoxyuridine
ccncgacagcangnangcacancnagaggcnacccagngaangagga

SEQ ID NO: 412 - DNA, 44 bp, Artificial Sequence
  Synthetic
  misc_feature (9)..(9): n is 5-[N-(1-naphthylmethyl)carboxyamide]-2'-deoxyuridine
  misc_feature (11)..(11): n is 5-[N-(1-naphthylmethyl)carboxyamide]-2'-deoxyuridine
  misc_feature (13)..(13): n is 5-[N-(1-naphthylmethyl)carboxyamide]-2'-deoxyuridine
  misc_feature (19)..(19): n is 5-[N-(1-naphthylmethyl)carboxyamide]-2'-deoxyuridine
  misc_feature (21)..(21): n is 5-[N-(1-naphthylmethyl)carboxyamide]-2'-deoxyuridine
  misc_feature (28)..(28): n is 5-[N-(1-naphthylmethyl)carboxyamide]-2'-deoxyuridine
  misc_feature (35)..(35): n is 5-[N-(1-naphthylmethyl)carboxyamide]-2'-deoxyuridine
  misc_feature (39)..(39): n is 5-[N-(1-naphthylmethyl)carboxyamide]-2'-deoxyuridine
cgacagcangnangcacancnagaggcnacccagngaangagga

SEQ ID NO: 413 - DNA, 41 bp, Artificial Sequence
  Synthetic
  misc_feature (6)..(6): n is 5-[N-(1-naphthylmethyl)carboxyamide]-2'-deoxyuridine
  misc_feature (8)..(8): n is 5-[N-(1-naphthylmethyl)carboxyamide]-2'-deoxyuridine
  misc_feature (10)..(10): n is 5-[N-(1-naphthylmethyl)carboxyamide]-2'-deoxyuridine
  misc_feature (16)..(16): n is 5-[N-(1-naphthylmethyl)carboxyamide]-2'-deoxyuridine
  misc_feature (18)..(18): n is 5-[N-(1-naphthylmethyl)carboxyamide]-2'-deoxyuridine
  misc_feature (25)..(25): n is 5-[N-(1-naphthylmethyl)carboxyamide]-2'-deoxyuridine
  misc_feature (32)..(32): n is 5-[N-(1-naphthylmethyl)carboxyamide]-2'-deoxyuridine
  misc_feature (36)..(36): n is 5-[N-(1-naphthylmethyl)carboxyamide]-2'-deoxyuridine
cagcangnangcacancnagaggcnacccagngaangagga

SEQ ID NO: 414 - DNA, 47 bp, Artificial Sequence
  Synthetic
  misc_feature (6)..(6): n is 5-[N-(1-naphthylmethyl)carboxyamide]-2'-deoxyuridine
  misc_feature (15)..(15): n is 5-[N-(1-naphthylmethyl)carboxyamide]-2'-deoxyuridine
  misc_feature (17)..(17): n is 5-[N-(1-naphthylmethyl)carboxyamide]-2'-deoxyuridine
  misc_feature (19)..(19): n is 5-[N-(1-naphthylmethyl)carboxyamide]-2'-deoxyuridine
  misc_feature (25)..(25): n is 5-[N-(1-naphthylmethyl)carboxyamide]-2'-deoxyuridine
  misc_feature (27)..(27): n is 5-[N-(1-naphthylmethyl)carboxyamide]-2'-deoxyuridine
  misc_feature (34)..(34): n is 5-[N-(1-naphthylmethyl)carboxyamide]-2'-deoxyuridine
  misc_feature (41)..(41): n is 5-[N-(1-naphthylmethyl)carboxyamide]-2'-deoxyuridine
  misc_feature (45)..(45): n is 5-[N-(1-naphthylmethyl)carboxyamide]-2'-deoxyuridine
ctgccncgacagcangnangcacancnagaggcnacccagngaanga

SEQ ID NO: 415 - DNA, 44 bp, Artificial Sequence
  Synthetic
  misc_feature (6)..(6): n is 5-[N-(1-naphthylmethyl)carboxyamide]-2'-deoxyuridine
  misc_feature (15)..(15): n is 5-[N-(1-naphthylmethyl)carboxyamide]-2'-deoxyuridine
  misc_feature (17)..(17): n is 5-[N-(1-naphthylmethyl)carboxyamide]-2'-deoxyuridine
  misc_feature (19)..(19): n is 5-[N-(1-naphthylmethyl)carboxyamide]-2'-deoxyuridine
  misc_feature (25)..(25): n is 5-[N-(1-naphthylmethyl)carboxyamide]-2'-deoxyuridine
  misc_feature (27)..(27): n is 5-[N-(1-naphthylmethyl)carboxyamide]-2'-deoxyuridine
  misc_feature (34)..(34): n is 5-[N-(1-naphthylmethyl)carboxyamide]-2'-deoxyuridine
  misc_feature (41)..(41): n is 5-[N-(1-naphthylmethyl)carboxyamide]-2'-deoxyuridine
ctgccncgacagcangnangcacancnagaggcnacccagngaa

SEQ ID NO: 416 - DNA, 41 bp, Artificial Sequence
  Synthetic
  misc_feature (6)..(6): n is 5-[N-(1-naphthylmethyl)carboxyamide]-2'-deoxyuridine
  misc_feature (15)..(15): n is 5-[N-(1-naphthylmethyl)carboxyamide]-2'-deoxyuridine
  misc_feature (17)..(17): n is 5-[N-(1-naphthylmethyl)carboxyamide]-2'-deoxyuridine
  misc_feature (19)..(19): n is 5-[N-(1-naphthylmethyl)carboxyamide]-2'-deoxyuridine
  misc_feature (25)..(25): n is 5-[N-(1-naphthylmethyl)carboxyamide]-2'-deoxyuridine
  misc_feature (27)..(27): n is 5-[N-(1-naphthylmethyl)carboxyamide]-2'-deoxyuridine
  misc_feature (34)..(34): n is 5-[N-(1-naphthylmethyl)carboxyamide]-2'-deoxyuridine
  misc_feature (41)..(41): n is 5-[N-(1-naphthylmethyl)carboxyamide]-2'-deoxyuridine
ctgccncgacagcangnangcacancnagaggcnacccagn

SEQ ID NO: 417 - DNA, 38 bp, Artificial Sequence
  Synthetic
  misc_feature (6)..(6): n is 5-[N-(1-naphthylmethyl)carboxyamide]-2'-deoxyuridine
  misc_feature (15)..(15): n is 5-[N-(1-naphthylmethyl)carboxyamide]-2'-deoxyuridine
  misc_feature (17)..(17): n is 5-[N-(1-naphthylmethyl)carboxyamide]-2'-deoxyuridine
  misc_feature (19)..(19): n is 5-[N-(1-naphthylmethyl)carboxyamide]-2'-deoxyuridine
  misc_feature (25)..(25): n is 5-[N-(1-naphthylmethyl)carboxyamide]-2'-deoxyuridine
  misc_feature (27)..(27): n is 5-[N-(1-naphthylmethyl)carboxyamide]-2'-deoxyuridine
  misc_feature (34)..(34): n is 5-[N-(1-naphthylmethyl)carboxyamide]-2'-deoxyuridine
ctgccncgacagcangnangcacancnagaggcnaccc

SEQ ID NO: 418 - DNA, 35 bp, Artificial Sequence
  Synthetic
  misc_feature (6)..(6): n is 5-[N-(1-naphthylmethyl)carboxyamide]-2'-deoxyuridine
  misc_feature (15)..(15): n is 5-[N-(1-naphthylmethyl)carboxyamide]-2'-deoxyuridine
  misc_feature (17)..(17): n is 5-[N-(1-naphthylmethyl)carboxyamide]-2'-deoxyuridine
  misc_feature (19)..(19): n is 5-[N-(1-naphthylmethyl)carboxyamide]-2'-deoxyuridine
  misc_feature (25)..(25): n is 5-[N-(1-naphthylmethyl)carboxyamide]-2'-deoxyuridine
  misc_feature (27)..(27): n is 5-[N-(1-naphthylmethyl)carboxyamide]-2'-deoxyuridine
  misc_feature (34)..(34): n is 5-[N-(1-naphthylmethyl)carboxyamide]-2'-deoxyuridine
ctgccncgacagcangnangcacancnagaggcna

SEQ ID NO: 419 - DNA, 38 bp, Artificial Sequence
  Synthetic
  misc_feature (9)..(9): n is 5-[N-(1-naphthylmethyl)carboxyamide]-2'-deoxyuridine
  misc_feature (11)..(11): n is 5-[N-(1-naphthylmethyl)carboxyamide]-2'-deoxyuridine
  misc_feature (13)..(13): n is 5-[N-(1-naphthylmethyl)carboxyamide]-2'-deoxyuridine
  misc_feature (19)..(19): n is 5-[N-(1-naphthylmethyl)carboxyamide]-2'-deoxyuridine
  misc_feature (21)..(21): n is 5-[N-(1-naphthylmethyl)carboxyamide]-2'-deoxyuridine
  misc_feature (28)..(28): n is 5-[N-(1-naphthylmethyl)carboxyamide]-2'-deoxyuridine
  misc_feature (35)..(35): n is 5-[N-(1-naphthylmethyl)carboxyamide]-2'-deoxyuridine
cgacagcangnangcacancnagaggcnacccagngaa

SEQ ID NO: 420 - DNA, 37 bp, Artificial Sequence
  Synthetic
  misc_feature (8)..(8): n is 5-[N-(1-naphthylmethyl)carboxyamide]-2'-deoxyuridine
  misc_feature (10)..(10): n is 5-[N-(1-naphthylmethyl)carboxyamide]-2'-deoxyuridine
  misc_feature (12)..(12): n is 5-[N-(1-naphthylmethyl)carboxyamide]-2'-deoxyuridine
  misc_feature (18)..(18): n is 5-[N-(1-naphthylmethyl)carboxyamide]-2'-deoxyuridine
  misc_feature (20)..(20): n is 5-[N-(1-naphthylmethyl)carboxyamide]-2'-deoxyuridine
  misc_feature (27)..(27): n is 5-[N-(1-naphthylmethyl)carboxyamide]-2'-deoxyuridine
  misc_feature (34)..(34): n is 5-[N-(1-naphthylmethyl)carboxyamide]-2'-deoxyuridine
gacagcangnangcacancnagaggcnacccagngaa

SEQ ID NO: 421 - DNA, 36 bp, Artificial Sequence
  Synthetic
  misc_feature (7)..(7): n is 5-[N-(1-naphthylmethyl)carboxyamide]-2'-deoxyuridine
  misc_feature (9)..(9): n is 5-[N-(1-naphthylmethyl)carboxyamide]-2'-deoxyuridine
  misc_feature (11)..(11): n is 5-[N-(1-naphthylmethyl)carboxyamide]-2'-deoxyuridine
  misc_feature (17)..(17): n is 5-[N-(1-naphthylmethyl)carboxyamide]-2'-deoxyuridine
  misc_feature (19)..(19): n is 5-[N-(1-naphthylmethyl)carboxyamide]-2'-deoxyuridine
  misc_feature (26)..(26): n is 5-[N-(1-naphthylmethyl)carboxyamide]-2'-deoxyuridine
  misc_feature (33)..(33): n is 5-[N-(1-naphthylmethyl)carboxyamide]-2'-deoxyuridine
acagcangnangcacancnagaggcnacccagngaa

SEQ ID NO: 422 - DNA, 37 bp, Artificial Sequence
  Synthetic
  misc_feature (9)..(9): n is 5-[N-(1-naphthylmethyl)carboxyamide]-2'-deoxyuridine
  misc_feature (11)..(11): n is 5-[N-(1-naphthylmethyl)carboxyamide]-2'-deoxyuridine
  misc_feature (13)..(13): n is 5-[N-(1-naphthylmethyl)carboxyamide]-2'-deoxyuridine
  misc_feature (19)..(19): n is 5-[N-(1-naphthylmethyl)carboxyamide]-2'-deoxyuridine
  misc_feature (21)..(21): n is 5-[N-(1-naphthylmethyl)carboxyamide]-2'-deoxyuridine
  misc_feature (28)..(28): n is 5-[N-(1-naphthylmethyl)carboxyamide]-2'-deoxyuridine
  misc_feature (35)..(35): n is 5-[N-(1-naphthylmethyl)carboxyamide]-2'-deoxyuridine
cgacagcangnangcacancnagaggcnacccagnga

SEQ ID NO: 423 - DNA, 36 bp, Artificial Sequence
  Synthetic
  misc_feature (9)..(9): n is 5-[N-(1-naphthylmethyl)carboxyamide]-2'-deoxyuridine
  misc_feature (11)..(11): n is 5-[N-(1-naphthylmethyl)carboxyamide]-2'-deoxyuridine
  misc_feature (13)..(13): n is 5-[N-(1-naphthylmethyl)carboxyamide]-2'-deoxyuridine
  misc_feature (19)..(19): n is 5-[N-(1-naphthylmethyl)carboxyamide]-2'-deoxyuridine
  misc_feature (21)..(21): n is 5-[N-(1-naphthylmethyl)carboxyamide]-2'-deoxyuridine
  misc_feature (28)..(28): n is 5-[N-(1-naphthylmethyl)carboxyamide]-2'-deoxyuridine
  misc_feature (35)..(35): n is 5-[N-(1-naphthylmethyl)carboxyamide]-2'-deoxyuridine
cgacagcangnangcacancnagaggcnacccagng

SEQ ID NO: 424 - DNA, 35 bp, Artificial Sequence
  Synthetic
  misc_feature (9)..(9): n is 5-[N-(1-naphthylmethyl)carboxyamide]-2'-deoxyuridine
  misc_feature (11)..(11): n is 5-[N-(1-naphthylmethyl)carboxyamide]-2'-deoxyuridine
  misc_feature (13)..(13): n is 5-[N-(1-naphthylmethyl)carboxyamide]-2'-deoxyuridine
  misc_feature (19)..(19): n is 5-[N-(1-naphthylmethyl)carboxyamide]-2'-deoxyuridine
  misc_feature (21)..(21): n is 5-[N-(1-naphthylmethyl)carboxyamide]-2'-deoxyuridine
  misc_feature (28)..(28): n is 5-[N-(1-naphthylmethyl)carboxyamide]-2'-deoxyuridine
  misc_feature (35)..(35): n is 5-[N-(1-naphthylmethyl)carboxyamide]-2'-deoxyuridine
cgacagcangnangcacancnagaggcnacccagn

SEQ ID NO: 425 - DNA, 29 bp, Artificial Sequence
  Synthetic
  misc_feature (9)..(9): n is 5-[N-(1-naphthylmethyl)carboxyamide]-2'-deoxyuridine
  misc_feature (11)..(11): n is 5-[N-(1-naphthylmethyl)carboxyamide]-2'-deoxyuridine
  misc_feature (13)..(13): n is 5-[N-(1-naphthylmethyl)carboxyamide]-2'-deoxyuridine
  misc_feature (19)..(19): n is 5-[N-(1-naphthylmethyl)carboxyamide]-2'-deoxyuridine
  misc_feature (21)..(21): n is 5-[N-(1-naphthylmethyl)carboxyamide]-2'-deoxyuridine
  misc_feature (28)..(28): n is 5-[N-(1-naphthylmethyl)carboxyamide]-2'-deoxyuridine
cgacagcangnangcacancnagaggcna

SEQ ID NO: 426 - DNA, 28 bp, Artificial Sequence
  Synthetic
  misc_feature (9)..(9): n is 5-[N-(1-naphthylmethyl)carboxyamide]-2'-deoxyuridine
  misc_feature (11)..(11): n is 5-[N-(1-naphthylmethyl)carboxyamide]-2'-deoxyuridine
  misc_feature (13)..(13): n is 5-[N-(1-naphthylmethyl)carboxyamide]-2'-deoxyuridine
  misc_feature (19)..(19): n is 5-[N-(1-naphthylmethyl)carboxyamide]-2'-deoxyuridine
  misc_feature (21)..(21): n is 5-[N-(1-naphthylmethyl)carboxyamide]-2'-deoxyuridine
  misc_feature (28)..(28): n is 5-[N-(1-naphthylmethyl)carboxyamide]-2'-deoxyuridine
cgacagcangnangcacancnagaggcn

SEQ ID NO: 427 - DNA, 27 bp, Artificial Sequence
  Synthetic
  misc_feature (9)..(9): n is 5-[N-(1-naphthylmethyl)carboxyamide]-2'-deoxyuridine
  misc_feature (11)..(11): n is 5-[N-(1-naphthylmethyl)carboxyamide]-2'-deoxyuridine
  misc_feature (13)..(13): n is 5-[N-(1-naphthylmethyl)carboxyamide]-2'-deoxyuridine
  misc_feature (19)..(19): n is 5-[N-(1-naphthylmethyl)carboxyamide]-2'-deoxyuridine
  misc_feature (21)..(21): n is 5-[N-(1-naphthylmethyl)carboxyamide]-2'-deoxyuridine
cgacagcangnangcacancnagaggc

SEQ ID NO: 428 - DNA, 26 bp, Artificial Sequence
  Synthetic
  misc_feature (9)..(9): n is 5-[N-(1-naphthylmethyl)carboxyamide]-2'-deoxyuridine
  misc_feature (11)..(11): n is 5-[N-(1-naphthylmethyl)carboxyamide]-2'-deoxyuridine
  misc_feature (13)..(13): n is 5-[N-(1-naphthylmethyl)carboxyamide]-2'-deoxyuridine
  misc_feature (19)..(19): n is 5-[N-(1-naphthylmethyl)carboxyamide]-2'-deoxyuridine
  misc_feature (21)..(21): n is 5-[N-(1-naphthylmethyl)carboxyamide]-2'-deoxyuridine
cgacagcangnangcacancnagagg

SEQ ID NO: 429 - DNA, 25 bp, Artificial Sequence
  Synthetic
  misc_feature (9)..(9): n is 5-[N-(1-naphthylmethyl)carboxyamide]-2'-deoxyuridine
  misc_feature (11)..(11): n is 5-[N-(1-naphthylmethyl)carboxyamide]-2'-deoxyuridine
  misc_feature (13)..(13): n is 5-[N-(1-naphthylmethyl)carboxyamide]-2'-deoxyuridine
  misc_feature (19)..(19): n is 5-[N-(1-naphthylmethyl)carboxyamide]-2'-deoxyuridine
  misc_feature (21)..(21): n is 5-[N-(1-naphthylmethyl)carboxyamide]-2'-deoxyuridine
cgacagcangnangcacancnagag

SEQ ID NO: 430 - DNA, 24 bp, Artificial Sequence
  Synthetic
  misc_feature (9)..(9): n is 5-[N-(1-naphthylmethyl)carboxyamide]-2'-deoxyuridine
  misc_feature (11)..(11): n is 5-[N-(1-naphthylmethyl)carboxyamide]-2'-deoxyuridine
  misc_feature (13)..(13): n is 5-[N-(1-naphthylmethyl)carboxyamide]-2'-deoxyuridine
  misc_feature (19)..(19): n is 5-[N-(1-naphthylmethyl)carboxyamide]-2'-deoxyuridine
  misc_feature (21)..(21): n is 5-[N-(1-naphthylmethyl)carboxyamide]-2'-deoxyuridine
cgacagcangnangcacancnaga

SEQ ID NO: 431 - DNA, 23 bp, Artificial Sequence
  Synthetic
  misc_feature (9)..(9): n is 5-[N-(1-naphthylmethyl)carboxyamide]-2'-deoxyuridine
  misc_feature (11)..(11): n is 5-[N-(1-naphthylmethyl)carboxyamide]-2'-deoxyuridine
  misc_feature (13)..(13): n is 5-[N-(1-naphthylmethyl)carboxyamide]-2'-deoxyuridine
  misc_feature (19)..(19): n is 5-[N-(1-naphthylmethyl)carboxyamide]-2'-deoxyuridine
  misc_feature (21)..(21): n is 5-[N-(1-naphthylmethyl)carboxyamide]-2'-deoxyuridine
cgacagcangnangcacancnag

SEQ ID NO: 432 - DNA, 22 bp, Artificial Sequence
  Synthetic
  misc_feature (9)..(9): n is 5-[N-(1-naphthylmethyl)carboxyamide]-2'-deoxyuridine
  misc_feature (11)..(11): n is 5-[N-(1-naphthylmethyl)carboxyamide]-2'-deoxyuridine
  misc_feature (13)..(13): n is 5-[N-(1-naphthylmethyl)carboxyamide]-2'-deoxyuridine
  misc_feature (19)..(19): n is 5-[N-(1-naphthylmethyl)carboxyamide]-2'-deoxyuridine
  misc_feature (21)..(21): n is 5-[N-(1-naphthylmethyl)carboxyamide]-2'-deoxyuridine
cgacagcangnangcacancna

SEQ ID NO: 433 - DNA, 21 bp, Artificial Sequence
  Synthetic
  misc_feature (9)..(9): n is 5-[N-(1-naphthylmethyl)carboxyamide]-2'-deoxyuridine
  misc_feature (11)..(11): n is 5-[N-(1-naphthylmethyl)carboxyamide]-2'-deoxyuridine
  misc_feature (13)..(13): n is 5-[N-(1-naphthylmethyl)carboxyamide]-2'-deoxyuridine
  misc_feature (19)..(19): n is 5-[N-(1-naphthylmethyl)carboxyamide]-2'-deoxyuridine
  misc_feature (21)..(21): n is 5-[N-(1-naphthylmethyl)carboxyamide]-2'-deoxyuridine
cgacagcangnangcacancn

SEQ ID NO: 434 - DNA, 23 bp, Artificial Sequence
  Synthetic
  misc_feature (8)..(8): n is 5-[N-(1-naphthylmethyl)carboxyamide]-2'-deoxyuridine
  misc_feature (10)..(10): n is 5-[N-(1-naphthylmethyl)carboxyamide]-2'-deoxyuridine
  misc_feature (12)..(12): n is 5-[N-(1-naphthylmethyl)carboxyamide]-2'-deoxyuridine
  misc_feature (18)..(18): n is 5-[N-(1-naphthylmethyl)carboxyamide]-2'-deoxyuridine
  misc_feature (20)..(20): n is 5-[N-(1-naphthylmethyl)carboxyamide]-2'-deoxyuridine
gacagcangnangcacancnaga

SEQ ID NO: 435 - DNA, 22 bp, Artificial Sequence
  Synthetic
  misc_feature (8)..(8): n is 5-[N-(1-naphthylmethyl)carboxyamide]-2'-deoxyuridine
  misc_feature (10)..(10): n is 5-[N-(1-naphthylmethyl)carboxyamide]-2'-deoxyuridine
  misc_feature (12)..(12): n is 5-[N-(1-naphthylmethyl)carboxyamide]-2'-deoxyuridine
  misc_feature (18)..(18): n is 5-[N-(1-naphthylmethyl)carboxyamide]-2'-deoxyuridine
  misc_feature (20)..(20): n is 5-[N-(1-naphthylmethyl)carboxyamide]-2'-deoxyuridine
gacagcangnangcacancnag

SEQ ID NO: 436 - DNA, 21 bp, Artificial Sequence
  Synthetic
  misc_feature (8)..(8): n is 5-[N-(1-naphthylmethyl)carboxyamide]-2'-deoxyuridine
  misc_feature (10)..(10): n is 5-[N-(1-naphthylmethyl)carboxyamide]-2'-deoxyuridine
  misc_feature (12)..(12): n is 5-[N-(1-naphthylmethyl)carboxyamide]-2'-deoxyuridine
  misc_feature (18)..(18): n is 5-[N-(1-naphthylmethyl)carboxyamide]-2'-deoxyuridine
  misc_feature (20)..(20): n is 5-[N-(1-naphthylmethyl)carboxyamide]-2'-deoxyuridine
gacagcangnangcacancna

SEQ ID NO: 437 - DNA, 20 bp, Artificial Sequence
  Synthetic
  misc_feature (8)..(8): n is 5-[N-(1-naphthylmethyl)carboxyamide]-2'-deoxyuridine
  misc_feature (10)..(10): n is 5-[N-(1-naphthylmethyl)carboxyamide]-2'-deoxyuridine
  misc_feature (12)..(12): n is 5-[N-(1-naphthylmethyl)carboxyamide]-2'-deoxyuridine
  misc_feature (18)..(18): n is 5-[N-(1-naphthylmethyl)carboxyamide]-2'-deoxyuridine
  misc_feature (20)..(20): n is 5-[N-(1-naphthylmethyl)carboxyamide]-2'-deoxyuridine
gacagcangnangcacancn

SEQ ID NO: 438 - DNA, 24 bp, Artificial Sequence
  Synthetic
  misc_feature (8)..(8): n is 5-[N-(1-naphthylmethyl)carboxyamide]-2'-deoxyuridine
  misc_feature (10)..(10): n is 5-[N-(1-naphthylmethyl)carboxyamide]-2'-deoxyuridine
  misc_feature (12)..(12): n is 5-[N-(1-naphthylmethyl)carboxyamide]-2'-deoxyuridine
  misc_feature (18)..(18): n is 5-[N-(1-naphthylmethyl)carboxyamide]-2'-deoxyuridine
  misc_feature (20)..(20): n is 5-[N-(1-naphthylmethyl)carboxyamide]-2'-deoxyuridine
gacagcangnangcacancnagag

SEQ ID NO: 439 - DNA, 21 bp, Artificial Sequence
  Synthetic
  misc_feature (1)..(1): n is 1,3-propane diol
  misc_feature (9)..(9): n is 5-[N-(1-naphthylmethyl)carboxyamide]-2'-deoxyuridine
  misc_feature (11)..(11): n is 5-[N-(1-naphthylmethyl)carboxyamide]-2'-deoxyuridine
  misc_feature (13)..(13): n is 5-[N-(1-naphthylmethyl)carboxyamide]-2'-deoxyuridine
  misc_feature (19)..(19): n is 5-[N-(1-naphthylmethyl)carboxyamide]-2'-deoxyuridine
  misc_feature (21)..(21): n is 5-[N-(1-naphthylmethyl)carboxyamide]-2'-deoxyuridine
ngacagcangnangcacancn

SEQ ID NO: 440 - DNA, 21 bp, Artificial Sequence
  Synthetic
  misc_feature (2)..(2): n is 1,3-propane diol
  misc_feature (9)..(9): n is 5-[N-(1-naphthylmethyl)carboxyamide]-2'-deoxyuridine
  misc_feature (11)..(11): n is 5-[N-(1-naphthylmethyl)carboxyamide]-2'-deoxyuridine
  misc_feature (13)..(13): n is 5-[N-(1-naphthylmethyl)carboxyamide]-2'-deoxyuridine
  misc_feature (19)..(19): n is 5-[N-(1-naphthylmethyl)carboxyamide]-2'-deoxyuridine
  misc_feature (21)..(21): n is 5-[N-(1-naphthylmethyl)carboxyamide]-2'-deoxyuridine
cnacagcangnangcacancn

SEQ ID NO: 441 - DNA, 21 bp, Artificial Sequence
  Synthetic
  misc_feature (3)..(3): n is 1,3-propane diol
  misc_feature (9)..(9): n is 5-[N-(1-naphthylmethyl)carboxyamide]-2'-deoxyuridine
  misc_feature (11)..(11): n is 5-[N-(1-naphthylmethyl)carboxyamide]-2'-deoxyuridine
  misc_feature (13)..(13): n is 5-[N-(1-naphthylmethyl)carboxyamide]-2'-deoxyuridine
  misc_feature (19)..(19): n is 5-[N-(1-naphthylmethyl)carboxyamide]-2'-deoxyuridine
  misc_feature (21)..(21): n is 5-[N-(1-naphthylmethyl)carboxyamide]-2'-deoxyuridine
cgncagcangnangcacancn

SEQ ID NO: 442 - DNA, 21 bp, Artificial Sequence
  Synthetic
  misc_feature (4)..(4): n is 1,3-propane diol
  misc_feature (9)..(9): n is 5-[N-(1-naphthylmethyl)carboxyamide]-2'-deoxyuridine
  misc_feature (11)..(11): n is 5-[N-(1-naphthylmethyl)carboxyamide]-2'-deoxyuridine
  misc_feature (13)..(13): n is 5-[N-(1-naphthylmethyl)carboxyamide]-2'-deoxyuridine
  misc_feature (19)..(19): n is 5-[N-(1-naphthylmethyl)carboxyamide]-2'-deoxyuridine
  misc_feature (21)..(21): n is 5-[N-(1-naphthylmethyl)carboxyamide]-2'-deoxyuridine
cganagcangnangcacancn

SEQ ID NO: 443 - DNA, 21 bp, Artificial Sequence
  Synthetic
  misc_feature (5)..(5): n is 1,3-propane diol
  misc_feature (9)..(9): n is 5-[N-(1-naphthylmethyl)carboxyamide]-2'-deoxyuridine
  misc_feature (11)..(11): n is 5-[N-(1-naphthylmethyl)carboxyamide]-2'-deoxyuridine
  misc_feature (13)..(13): n is 5-[N-(1-naphthylmethyl)carboxyamide]-2'-deoxyuridine
  misc_feature (19)..(19): n is 5-[N-(1-naphthylmethyl)carboxyamide]-2'-deoxyuridine
  misc_feature (21)..(21): n is 5-[N-(1-naphthylmethyl)carboxyamide]-2'-deoxyuridine
cgacngcangnangcacancn

SEQ ID NO: 444 - DNA, 21 bp, Artificial Sequence
  Synthetic
  misc_feature (6)..(6): n is 1,3-propane diol
  misc_feature (9)..(9): n is 5-[N-(1-naphthylmethyl)carboxyamide]-2'-deoxyuridine
  misc_feature (11)..(11): n is 5-[N-(1-naphthylmethyl)carboxyamide]-2'-deoxyuridine
  misc_feature (13)..(13): n is 5-[N-(1-naphthylmethyl)carboxyamide]-2'-deoxyuridine
  misc_feature (19)..(19): n is 5-[N-(1-naphthylmethyl)carboxyamide]-2'-deoxyuridine
  misc_feature (21)..(21): n is 5-[N-(1-naphthylmethyl)carboxyamide]-2'-deoxyuridine
cgacancangnangcacancn

SEQ ID NO: 445 - DNA, 21 bp, Artificial Sequence
  Synthetic
  misc_feature (7)..(7): n is 1,3-propane diol
  misc_feature (9)..(9): n is 5-[N-(1-naphthylmethyl)carboxyamide]-2'-deoxyuridine
  misc_feature (11)..(11): n is 5-[N-(1-naphthylmethyl)carboxyamide]-2'-deoxyuridine
  misc_feature (13)..(13): n is 5-[N-(1-naphthylmethyl)carboxyamide]-2'-deoxyuridine
  misc_feature (19)..(19): n is 5-[N-(1-naphthylmethyl)carboxyamide]-2'-deoxyuridine
  misc_feature (21)..(21): n is 5-[N-(1-naphthylmethyl)carboxyamide]-2'-deoxyuridine
cgacagnangnangcacancn

SEQ ID NO: 446 - DNA, 21 bp, Artificial Sequence
  Synthetic
  misc_feature (8)..(8): n is 1,3-propane diol
  misc_feature (9)..(9): n is 5-[N-(1-naphthylmethyl)carboxyamide]-2'-deoxyuridine
  misc_feature (11)..(11): n is 5-[N-(1-naphthylmethyl)carboxyamide]-2'-deoxyuridine
  misc_feature (13)..(13): n is 5-[N-(1-naphthylmethyl)carboxyamide]-2'-deoxyuridine
  misc_feature (19)..(19): n is 5-[N-(1-naphthylmethyl)carboxyamide]-2'-deoxyuridine
  misc_feature (21)..(21): n is 5-[N-(1-naphthylmethyl)carboxyamide]-2'-deoxyuridine
cgacagcnngnangcacancn

SEQ ID NO: 447 - DNA, 21 bp, Artificial Sequence
  Synthetic
  misc_feature (9)..(9): n is 1,3-propane diol
  misc_feature (11)..(11): n is 5-[N-(1-naphthylmethyl)carboxyamide]-2'-deoxyuridine
  misc_feature (13)..(13): n is 5-[N-(1-naphthylmethyl)carboxyamide]-2'-deoxyuridine
  misc_feature (19)..(19): n is 5-[N-(1-naphthylmethyl)carboxyamide]-2'-deoxyuridine
  misc_feature (21)..(21): n is 5-[N-(1-naphthylmethyl)carboxyamide]-2'-deoxyuridine
cgacagcangnangcacancn

SEQ ID NO: 448 - DNA, 21 bp, Artificial Sequence
  Synthetic
  misc_feature (9)..(9): n is 5-[N-(1-naphthylmethyl)carboxyamide]-2'-deoxyuridine
  misc_feature (10)..(10): n is 1,3-propane diol
  misc_feature (11)..(11): n is 5-[N-(1-naphthylmethyl)carboxyamide]-2'-deoxyuridine
  misc_feature (13)..(13): n is 5-[N-(1-naphthylmethyl)carboxyamide]-2'-deoxyuridine
  misc_feature (19)..(19): n is 5-[N-(1-naphthylmethyl)carboxyamide]-2'-deoxyuridine
  misc_feature (21)..(21): n is 5-[N-(1-naphthylmethyl)carboxyamide]-2'-deoxyuridine
cgacagcannnangcacancn

SEQ ID NO: 449 - DNA, 21 bp, Artificial Sequence
  Synthetic
  misc_feature (9)..(9): n is 5-[N-(1-naphthylmethyl)carboxyamide]-2'-deoxyuridine
  misc_feature (11)..(11): n is 1,3-propane diol
  misc_feature (13)..(13): n is 5-[N-(1-naphthylmethyl)carboxyamide]-2'-deoxyuridine
  misc_feature (19)..(19): n is 5-[N-(1-naphthylmethyl)carboxyamide]-2'-deoxyuridine
  misc_feature (21)..(21): n is 5-[N-(1-naphthylmethyl)carboxyamide]-2'-deoxyuridine
cgacagcangnangcacancn

SEQ ID NO: 450 - DNA, 21 bp, Artificial Sequence
  Synthetic
  misc_feature (9)..(9): n is 5-[N-(1-naphthylmethyl)carboxyamide]-2'-deoxyuridine
  misc_feature (11)..(11): n is 5-[N-(1-naphthylmethyl)carboxyamide]-2'-deoxyuridine
  misc_feature (12)..(12): n is 1,3-propane diol
  misc_feature (13)..(13): n is 5-[N-(1-naphthylmethyl)carboxyamide]-2'-deoxyuridine
  misc_feature (19)..(19): n is 5-[N-(1-naphthylmethyl)carboxyamide]-2'-deoxyuridine
  misc_feature (21)..(21): n is 5-[N-(1-naphthylmethyl)carboxyamide]-2'-deoxyuridine
cgacagcangnnngcacancn

SEQ ID NO: 451 - DNA, 21 bp, Artificial Sequence
  Synthetic
  misc_feature (9)..(9): n is 5-[N-(1-naphthylmethyl)carboxyamide]-2'-deoxyuridine
  misc_feature (11)..(11): n is 5-[N-(1-naphthylmethyl)carboxyamide]-2'-deoxyuridine
  misc_feature (13)..(13): n is 1,3-propane diol
  misc_feature (19)..(19): n is 5-[N-(1-naphthylmethyl)carboxyamide]-2'-deoxyuridine
  misc_feature (21)..(21): n is 5-[N-(1-naphthylmethyl)carboxyamide]-2'-deoxyuridine
cgacagcangnangcacancn

SEQ ID NO: 452 - DNA, 21 bp, Artificial Sequence
  Synthetic
  misc_feature (9)..(9): n is 5-[N-(1-naphthylmethyl)carboxyamide]-2'-deoxyuridine
  misc_feature (11)..(11): n is 5-[N-(1-naphthylmethyl)carboxyamide]-2'-deoxyuridine
  misc_feature (13)..(13): n is 5-[N-(1-naphthylmethyl)carboxyamide]-2'-deoxyuridine
  misc_feature (14)..(14): n is 1,3-propane diol
  misc_feature (19)..(19): n is 5-[N-(1-naphthylmethyl)carboxyamide]-2'-deoxyuridine
  misc_feature (21)..(21): n is 5-[N-(1-naphthylmethyl)carboxyamide]-2'-deoxyuridine
cgacagcangnanncacancn

SEQ ID NO: 453 - DNA, 21 bp, Artificial Sequence
  Synthetic
  misc_feature (9)..(9): n is 5-[N-(1-naphthylmethyl)carboxyamide]-2'-deoxyuridine
  misc_feature (11)..(11): n is 5-[N-(1-naphthylmethyl)carboxyamide]-2'-deoxyuridine
  misc_feature (13)..(13): n is 5-[N-(1-naphthylmethyl)carboxyamide]-2'-deoxyuridine
  misc_feature (15)..(15): n is 1,3-propane diol
  misc_feature (19)..(19): n is 5-[N-(1-naphthylmethyl)carboxyamide]-2'-deoxyuridine
  misc_feature (21)..(21): n is 5-[N-(1-naphthylmethyl)carboxyamide]-2'-deoxyuridine
cgacagcangnangnacancn

SEQ ID NO: 454 - DNA, 21 bp, Artificial Sequence
  Synthetic
  misc_feature (9)..(9): n is 5-[N-(1-naphthylmethyl)carboxyamide]-2'-deoxyuridine
  misc_feature (11)..(11): n is 5-[N-(1-naphthylmethyl)carboxyamide]-2'-deoxyuridine
  misc_feature (13)..(13): n is 5-[N-(1-naphthylmethyl)carboxyamide]-2'-deoxyuridine
  misc_feature (16)..(16): n is 1,3-propane diol
  misc_feature (19)..(19): n is 5-[N-(1-naphthylmethyl)carboxyamide]-2'-deoxyuridine
  misc_feature (21)..(21): n is 5-[N-(1-naphthylmethyl)carboxyamide]-2'-deoxyuridine
cgacagcangnangcncancn

SEQ ID NO: 455 - DNA, 21 bp, Artificial Sequence
  Synthetic
  misc_feature (9)..(9): n is 5-[N-(1-naphthylmethyl)carboxyamide]-2'-deoxyuridine
  misc_feature (11)..(11): n is 5-[N-(1-naphthylmethyl)carboxyamide]-2'-deoxyuridine
  misc_feature (13)..(13): n is 5-[N-(1-naphthylmethyl)carboxyamide]-2'-deoxyuridine
  misc_feature (17)..(17): n is 1,3-propane diol
  misc_feature (19)..(19): n is 5-[N-(1-naphthylmethyl)carboxyamide]-2'-deoxyuridine
  misc_feature (21)..(21): n is 5-[N-(1-naphthylmethyl)carboxyamide]-2'-deoxyuridine
cgacagcangnangcanancn

SEQ ID NO: 456 - DNA, 21 bp, Artificial Sequence
  Synthetic
  misc_feature (9)..(9): n is 5-[N-(1-naphthylmethyl)carboxyamide]-2'-deoxyuridine
  misc_feature (11)..(11): n is 5-[N-(1-naphthylmethyl)carboxyamide]-2'-deoxyuridine
  misc_feature (13)..(13): n is 5-[N-(1-naphthylmethyl)carboxyamide]-2'-deoxyuridine
  misc_feature (18)..(18): n is 1,3-propane diol
  misc_feature (19)..(19): n is 5-[N-(1-naphthylmethyl)carboxyamide]-2'-deoxyuridine
  misc_feature (21)..(21): n is 5-[N-(1-naphthylmethyl)carboxyamide]-2'-deoxyuridine
cgacagcangnangcacnncn

SEQ ID NO: 457 - DNA, 21 bp, Artificial Sequence
  Synthetic
  misc_feature (9)..(9): n is 5-[N-(1-naphthylmethyl)carboxyamide]-2'-deoxyuridine
  misc_feature (11)..(11): n is 5-[N-(1-naphthylmethyl)carboxyamide]-2'-deoxyuridine
  misc_feature (13)..(13): n is 5-[N-(1-naphthylmethyl)carboxyamide]-2'-deoxyuridine
  misc_feature (19)..(19): n is 1,3-propane diol
  misc_feature (21)..(21): n is 5-[N-(1-naphthylmethyl)carboxyamide]-2'-deoxyuridine
cgacagcangnangcacancn

SEQ ID NO: 458 - DNA, 21 bp, Artificial Sequence
  Synthetic
  misc_feature (9)..(9): n is 5-[N-(1-naphthylmethyl)carboxyamide]-2'-deoxyuridine
  misc_feature (11)..(11): n is 5-[N-(1-naphthylmethyl)carboxyamide]-2'-deoxyuridine
  misc_feature (13)..(13): n is 5-[N-(1-naphthylmethyl)carboxyamide]-2'-deoxyuridine
  misc_feature (19)..(19): n is 5-[N-(1-naphthylmethyl)carboxyamide]-2'-deoxyuridine
  misc_feature (20)..(20): n is 1,3-propane diol
  misc_feature (21)..(21): n is 5-[N-(1-naphthylmethyl)carboxyamide]-2'-deoxyuridine
cgacagcangnangcacannn

SEQ ID NO: 459 - DNA, 21 bp, Artificial Sequence
  Synthetic
  misc_feature (9)..(9): n is 5-[N-(1-naphthylmethyl)carboxyamide]-2'-deoxyuridine
  misc_feature (11)..(11): n is 5-[N-(1-naphthylmethyl)carboxyamide]-2'-deoxyuridine
  misc_feature (13)..(13): n is 5-[N-(1-naphthylmethyl)carboxyamide]-2'-deoxyuridine
  misc_feature (19)..(19): n is 5-[N-(1-naphthylmethyl)carboxyamide]-2'-deoxyuridine
  misc_feature (21)..(21): n is 1,3-propane diol
cgacagcangnangcacancn

SEQ ID NO: 460 - DNA, 21 bp, Artificial Sequence
  Synthetic
  misc_feature (1)..(1): n is 2'-O-methyl-cytidine
  misc_feature (9)..(9): n is 5-[N-(1-naphthylmethyl)carboxyamide]-2'-deoxyuridine
  misc_feature (11)..(11): n is 5-[N-(1-naphthylmethyl)carboxyamide]-2'-deoxyuridine
  misc_feature (13)..(13): n is 5-[N-(1-naphthylmethyl)carboxyamide]-2'-deoxyuridine
  misc_feature (19)..(19): n is 5-[N-(1-naphthylmethyl)carboxyamide]-2'-deoxyuridine
  misc_feature (21)..(21): n is 5-[N-(1-naphthylmethyl)carboxyamide]-2'-deoxyuridine
ngacagcangnangcacancn

SEQ ID NO: 461 - DNA, 21 bp, Artificial Sequence
  Synthetic
  misc_feature (4)..(4): n is 2'-O-methyl-cytidine
  misc_feature (9)..(9): n is 5-[N-(1-naphthylmethyl)carboxyamide]-2'-deoxyuridine
  misc_feature (11)..(11): n is 5-[N-(1-naphthylmethyl)carboxyamide]-2'-deoxyuridine
  misc_feature (13)..(13): n is 5-[N-(1-naphthylmethyl)carboxyamide]-2'-deoxyuridine
  misc_feature (19)..(19): n is 5-[N-(1-naphthylmethyl)carboxyamide]-2'-deoxyuridine
  misc_feature (21)..(21): n is 5-[N-(1-naphthylmethyl)carboxyamide]-2'-deoxyuridine
cganagcangnangcacancn

SEQ ID NO: 462 - DNA, 21 bp, Artificial Sequence
  Synthetic
  misc_feature (7)..(7): n is 2'-O-methyl-cytidine
  misc_feature (9)..(9): n is 5-[N-(1-naphthylmethyl)carboxyamide]-2'-deoxyuridine
  misc_feature (11)..(11): n is 5-[N-(1-naphthylmethyl)carboxyamide]-2'-deoxyuridine
  misc_feature (13)..(13): n is 5-[N-(1-naphthylmethyl)carboxyamide]-2'-deoxyuridine
  misc_feature (19)..(19): n is 5-[N-(1-naphthylmethyl)carboxyamide]-2'-deoxyuridine
  misc_feature (21)..(21): n is 5-[N-(1-naphthylmethyl)carboxyamide]-2'-deoxyuridine
cgacagnangnangcacancn

SEQ ID NO: 463 - DNA, 21 bp, Artificial Sequence
  Synthetic
  misc_feature (9)..(9): n is 5-[N-(1-naphthylmethyl)carboxyamide]-2'-deoxyuridine
  misc_feature (11)..(11): n is 5-[N-(1-naphthylmethyl)carboxyamide]-2'-deoxyuridine
  misc_feature (13)..(13): n is 5-[N-(1-naphthylmethyl)carboxyamide]-2'-deoxyuridine
  misc_feature (15)..(15): n is 2'-O-methyl-cytidine
  misc_feature (19)..(19): n is 5-[N-(1-naphthylmethyl)carboxyamide]-2'-deoxyuridine
  misc_feature (21)..(21): n is 5-[N-(1-naphthylmethyl)carboxyamide]-2'-deoxyuridine
cgacagcangnangnacancn

SEQ ID NO: 464 - DNA, 21 bp, Artificial Sequence
  Synthetic
  misc_feature (9)..(9): n is 5-[N-(1-naphthylmethyl)carboxyamide]-2'-deoxyuridine
  misc_feature (11)..(11): n is 5-[N-(1-naphthylmethyl)carboxyamide]-2'-deoxyuridine
  misc_feature (13)..(13): n is 5-[N-(1-naphthylmethyl)carboxyamide]-2'-deoxyuridine
  misc_feature (17)..(17): n is 2'-O-methyl-cytidine
  misc_feature (19)..(19): n is 5-[N-(1-naphthylmethyl)carboxyamide]-2'-deoxyuridine
  misc_feature (21)..(21): n is 5-[N-(1-naphthylmethyl)carboxyamide]-2'-deoxyuridine
cgacagcangnangcanancn

SEQ ID NO: 465 - DNA, 21 bp, Artificial Sequence
  Synthetic
  misc_feature (9)..(9): n is 5-[N-(1-naphthylmethyl)carboxyamide]-2'-deoxyuridine
  misc_feature (11)..(11): n is 5-[N-(1-naphthylmethyl)carboxyamide]-2'-deoxyuridine
  misc_feature (13)..(13): n is 5-[N-(1-naphthylmethyl)carboxyamide]-2'-deoxyuridine
  misc_feature (19)..(19): n is 5-[N-(1-naphthylmethyl)carboxyamide]-2'-deoxyuridine
  misc_feature (20)..(20): n is 2'-O-methyl-cytidine
  misc_feature (21)..(21): n is 5-[N-(1-naphthylmethyl)carboxyamide]-2'-deoxyuridine
cgacagcangnangcacannn

SEQ ID NO: 466 - DNA, 21 bp, Artificial Sequence
  Synthetic
  misc_feature (2)..(2): n is 2'-deoxyguanosine-3'-phosphorothioate
  misc_feature (2)..(2): n is 2'-O-methyl-guanosine
  misc_feature (9)..(9): n is 5-[N-(1-naphthylmethyl)carboxyamide]-2'-deoxyuridine
  misc_feature (11)..(11): n is 5-[N-(1-naphthylmethyl)carboxyamide]-2'-deoxyuridine
  misc_feature (13)..(13): n is 5-[N-(1-naphthylmethyl)carboxyamide]-2'-deoxyuridine
  misc_feature (19)..(19): n is 5-[N-(1-naphthylmethyl)carboxyamide]-2'-deoxyuridine
  misc_feature (21)..(21): n is 5-[N-(1-naphthylmethyl)carboxyamide]-2'-deoxyuridine
cnacagcangnangcacancn

SEQ ID NO: 467 - DNA, 21 bp, Artificial Sequence
  Synthetic
  misc_feature (6)..(6): n is 2'-O-methyl-guanosine
  misc_feature (9)..(9): n is 5-[N-(1-naphthylmethyl)carboxyamide]-2'-deoxyuridine
  misc_feature (11)..(11): n is 5-[N-(1-naphthylmethyl)carboxyamide]-2'-deoxyuridine
  misc_feature (13)..(13): n is 5-[N-(1-naphthylmethyl)carboxyamide]-2'-deoxyuridine
  misc_feature (19)..(19): n is 5-[N-(1-naphthylmethyl)carboxyamide]-2'-deoxyuridine
  misc_feature (21)..(21): n is 5-[N-(1-naphthylmethyl)carboxyamide]-2'-deoxyuridine
cgacancangnangcacancn

SEQ ID NO: 468 - DNA, 21 bp, Artificial Sequence
  Synthetic
  misc_feature (9)..(9): n is 5-[N-(1-naphthylmethyl)carboxyamide]-2'-deoxyuridine
  misc_feature (10)..(10): n is 2'-O-methyl-guanosine
  misc_feature (11)..(11): n is 5-[N-(1-naphthylmethyl)carboxyamide]-2'-deoxyuridine
  misc_feature (13)..(13): n is 5-[N-(1-naphthylmethyl)carboxyamide]-2'-deoxyuridine
  misc_feature (19)..(19): n is 5-[N-(1-naphthylmethyl)carboxyamide]-2'-deoxyuridine
  misc_feature (21)..(21): n is 5-[N-(1-naphthylmethyl)carboxyamide]-2'-deoxyuridine
cgacagcannnangcacancn

SEQ ID NO: 469 - DNA, 21 bp, Artificial Sequence
  Synthetic
  misc_feature (9)..(9): n is 5-[N-(1-naphthylmethyl)carboxyamide]-2'-deoxyuridine
  misc_feature (11)..(11): n is 5-[N-(1-naphthylmethyl)carboxyamide]-2'-deoxyuridine
  misc_feature (13)..(13): n is 5-[N-(1-naphthylmethyl)carboxyamide]-2'-deoxyuridine
  misc_feature (14)..(14): n is 2'-O-methyl-guanosine
  misc_feature (19)..(19): n is 5-[N-(1-naphthylmethyl)carboxyamide]-2'-deoxyuridine
  misc_feature (21)..(21): n is 5-[N-(1-naphthylmethyl)carboxyamide]-2'-deoxyuridine
cgacagcangnanncacancn

SEQ ID NO: 470 - DNA, 21 bp, Artificial Sequence
  Synthetic
  misc_feature (3)..(3): n is 2'-O-methyl-adenosine
  misc_feature (9)..(9): n is 5-[N-(1-naphthylmethyl)carboxyamide]-2'-deoxyuridine
  misc_feature (11)..(11): n is 5-[N-(1-naphthylmethyl)carboxyamide]-2'-deoxyuridine
  misc_feature (13)..(13): n is 5-[N-(1-naphthylmethyl)carboxyamide]-2'-deoxyuridine
  misc_feature (19)..(19): n is 5-[N-(1-naphthylmethyl)carboxyamide]-2'-deoxyuridine
  misc_feature (21)..(21): n is 5-[N-(1-naphthylmethyl)carboxyamide]-2'-deoxyuridine
cgncagcangnangcacancn

SEQ ID NO: 471 - DNA, 21 bp, Artificial Sequence
  Synthetic
  misc_feature (5)..(5): n is 2'-O-methyl-adenosine
  misc_feature (9)..(9): n is 5-[N-(1-naphthylmethyl)carboxyamide]-2'-deoxyuridine
  misc_feature (11)..(11): n is 5-[N-(1-naphthylmethyl)carboxyamide]-2'-deoxyuridine
  misc_feature (13)..(13): n is 5-[N-(1-naphthylmethyl)carboxyamide]-2'-deoxyuridine
  misc_feature (19)..(19): n is 5-[N-(1-naphthylmethyl)carboxyamide]-2'-deoxyuridine
  misc_feature (21)..(21): n is 5-[N-(1-naphthylmethyl)carboxyamide]-2'-deoxyuridine
cgacngcangnangcacancn

SEQ ID NO: 472 - DNA, 21 bp, Artificial Sequence
  Synthetic
  misc_feature (8)..(8): n is 2'-O-methyl-adenosine
  misc_feature (9)..(9): n is 5-[N-(1-naphthylmethyl)carboxyamide]-2'-deoxyuridine
  misc_feature (11)..(11): n is 5-[N-(1-naphthylmethyl)carboxyamide]-2'-deoxyuridine
  misc_feature (13)..(13): n is 5-[N-(1-naphthylmethyl)carboxyamide]-2'-deoxyuridine
  misc_feature (19)..(19): n is 5-[N-(1-naphthylmethyl)carboxyamide]-2'-deoxyuridine
  misc_feature (21)..(21): n is 5-[N-(1-naphthylmethyl)carboxyamide]-2'-deoxyuridine
cgacagcnngnangcacancn

SEQ ID NO: 473 - DNA, 21 bp, Artificial Sequence
  Synthetic
  misc_feature (9)..(9): n is 5-[N-(1-naphthylmethyl)carboxyamide]-2'-deoxyuridine
  misc_feature (11)..(11): n is 5-[N-(1-naphthylmethyl)carboxyamide]-2'-deoxyuridine
  misc_feature (12)..(12): n is 2'-O-methyl-adenosine
  misc_feature (13)..(13): n is 5-[N-(1-naphthylmethyl)carboxyamide]-2'-deoxyuridine
  misc_feature (19)..(19): n is 5-[N-(1-naphthylmethyl)carboxyamide]-2'-deoxyuridine
  misc_feature (21)..(21): n is 5-[N-(1-naphthylmethyl)carboxyamide]-2'-deoxyuridine
cgacagcangnnngcacancn

SEQ ID NO: 474 - DNA, 21 bp, Artificial Sequence
  Synthetic
  misc_feature (9)..(9): n is 5-[N-(1-naphthylmethyl)carboxyamide]-2'-deoxyuridine
  misc_feature (11)..(11): n is 5-[N-(1-naphthylmethyl)carboxyamide]-2'-deoxyuridine
  misc_feature (13)..(13): n is 5-[N-(1-naphthylmethyl)carboxyamide]-2'-deoxyuridine
  misc_feature (16)..(16): n is 2'-O-methyl-adenosine
  misc_feature (19)..(19): n is 5-[N-(1-naphthylmethyl)carboxyamide]-2'-deoxyuridine
  misc_feature (21)..(21): n is 5-[N-(1-naphthylmethyl)carboxyamide]-2'-deoxyuridine
cgacagcangnangcncancn

SEQ ID NO: 475 - DNA, 21 bp, Artificial Sequence
  Synthetic
  misc_feature (9)..(9): n is 5-[N-(1-naphthylmethyl)carboxyamide]-2'-deoxyuridine
  misc_feature (11)..(11): n is 5-[N-(1-naphthylmethyl)carboxyamide]-2'-deoxyuridine
  misc_feature (13)..(13): n is 5-[N-(1-naphthylmethyl)carboxyamide]-2'-deoxyuridine
  misc_feature (18)..(18): n is 2'-O-methyl-adenosine
  misc_feature (19)..(19): n is 5-[N-(1-naphthylmethyl)carboxyamide]-2'-deoxyuridine
  misc_feature (21)..(21): n is 5-[N-(1-naphthylmethyl)carboxyamide]-2'-deoxyuridine
cgacagcangnangcacnncn

SEQ ID NO: 476 - DNA, 21 bp, Artificial Sequence
  Synthetic
  misc_feature (9)..(9): n is 5-[N-(1-naphthylmethyl)carboxyamide]-2'- O-methyl-uridine
  misc_feature (11)..(11): n is 5-[N-(1-naphthylmethyl)carboxyamide]-2'-deoxyuridine
  misc_feature (13)..(13): n is 5-[N-(1-naphthylmethyl)carboxyamide]-2'-deoxyuridine
  misc_feature (19)..(19): n is 5-[N-(1-naphthylmethyl)carboxyamide]-2'-deoxyuridine
  misc_feature (21)..(21): n is 5-[N-(1-naphthylmethyl)carboxyamide]-2'-deoxyuridine
cgacagcangnangcacancn

SEQ ID NO: 477 - DNA, 21 bp, Artificial Sequence
  Synthetic
  misc_feature (9)..(9): n is 5-[N-(1-naphthylmethyl)carboxyamide]-2'-deoxyuridine
  misc_feature (11)..(11): n is 5-[N-(1-naphthylmethyl)carboxyamide]-2'- O-methyl-uridine
  misc_feature (13)..(13): n is 5-[N-(1-naphthylmethyl)carboxyamide]-2'-deoxyuridine
  misc_feature (19)..(19): n is 5-[N-(1-naphthylmethyl)carboxyamide]-2'-deoxyuridine
  misc_feature (21)..(21): n is 5-[N-(1-naphthylmethyl)carboxyamide]-2'-deoxyuridine
cgacagcangnangcacancn

SEQ ID NO: 478 - DNA, 21 bp, Artificial Sequence
  Synthetic
  misc_feature (9)..(9): n is 5-[N-(1-naphthylmethyl)carboxyamide]-2'-deoxyuridine
  misc_feature (11)..(11): n is 5-[N-(1-naphthylmethyl)carboxyamide]-2'-deoxyuridine
  misc_feature (13)..(13): n is 5-[N-(1-naphthylmethyl)carboxyamide]-2'- O-methyl-uridine
  misc_feature (19)..(19): n is 5-[N-(1-naphthylmethyl)carboxyamide]-2'-deoxyuridine
  misc_feature (21)..(21): n is 5-[N-(1-naphthylmethyl)carboxyamide]-2'-deoxyuridine
cgacagcangnangcacancn

SEQ ID NO: 479 - DNA, 21 bp, Artificial Sequence
  Synthetic
  misc_feature (9)..(9): n is 5-[N-(1-naphthylmethyl)carboxyamide]-2'-deoxyuridine
  misc_feature (11)..(11): n is 5-[N-(1-naphthylmethyl)carboxyamide]-2'-deoxyuridine
  misc_feature (13)..(13): n is 5-[N-(1-naphthylmethyl)carboxyamide]-2'-deoxyuridine
  misc_feature (19)..(19): n is 5-[N-(1-naphthylmethyl)carboxyamide]-2'- O-methyl-uridine
  misc_feature (21)..(21): n is 5-[N-(1-naphthylmethyl)carboxyamide]-2'-deoxyuridine
cgacagcangnangcacancn

SEQ ID NO: 480 - DNA, 21 bp, Artificial Sequence
  Synthetic
  misc_feature (9)..(9): n is 5-[N-(1-naphthylmethyl)carboxyamide]-2'-deoxyuridine
  misc_feature (11)..(11): n is 5-[N-(1-naphthylmethyl)carboxyamide]-2'-deoxyuridine
  misc_feature (13)..(13): n is 5-[N-(1-naphthylmethyl)carboxyamide]-2'-deoxyuridine
  misc_feature (19)..(19): n is 5-[N-(1-naphthylmethyl)carboxyamide]-2'-deoxyuridine
  misc_feature (21)..(21): n is 5-[N-(1-naphthylmethyl)carboxyamide]-2'- O-methyl-uridine
cgacagcangnangcacancn

SEQ ID NO: 481 - DNA, 21 bp, Artificial Sequence
  Synthetic
  misc_feature (11)..(11): n is 5-[N-(1-naphthylmethyl)carboxyamide]-2'-deoxyuridine
  misc_feature (13)..(13): n is 5-[N-(1-naphthylmethyl)carboxyamide]-2'-deoxyuridine
  misc_feature (19)..(19): n is 5-[N-(1-naphthylmethyl)carboxyamide]-2'-deoxyuridine
  misc_feature (21)..(21): n is 5-[N-(1-naphthylmethyl)carboxyamide]-2'-deoxyuridine
cgacagcatgnangcacancn

SEQ ID NO: 482 - DNA, 21 bp, Artificial Sequence
  Synthetic
  misc_feature (9)..(9): n is 5-[N-(1-naphthylmethyl)carboxyamide]-2'-deoxyuridine
  misc_feature (13)..(13): n is 5-[N-(1-naphthylmethyl)carboxyamide]-2'-deoxyuridine
  misc_feature (19)..(19): n is 5-[N-(1-naphthylmethyl)carboxyamide]-2'-deoxyuridine
  misc_feature (21)..(21): n is 5-[N-(1-naphthylmethyl)carboxyamide]-2'-deoxyuridine
cgacagcangtangcacancn

SEQ ID NO: 483 - DNA, 21 bp, Artificial Sequence
  Synthetic
  misc_feature (9)..(9): n is 5-[N-(1-naphthylmethyl)carboxyamide]-2'-deoxyuridine
  misc_feature (11)..(11): n is 5-[N-(1-naphthylmethyl)carboxyamide]-2'-deoxyuridine
  misc_feature (19)..(19): n is 5-[N-(1-naphthylmethyl)carboxyamide]-2'-deoxyuridine
  misc_feature (21)..(21): n is 5-[N-(1-naphthylmethyl)carboxyamide]-2'-deoxyuridine
cgacagcangnatgcacancn

SEQ ID NO: 484 - DNA, 21 bp, Artificial Sequence
  Synthetic
  misc_feature (9)..(9): n is 5-[N-(1-naphthylmethyl)carboxyamide]-2'-deoxyuridine
  misc_feature (11)..(11): n is 5-[N-(1-naphthylmethyl)carboxyamide]-2'-deoxyuridine
  misc_feature (13)..(13): n is 5-[N-(1-naphthylmethyl)carboxyamide]-2'-deoxyuridine
  misc_feature (21)..(21): n is 5-[N-(1-naphthylmethyl)carboxyamide]-2'-deoxyuridine
cgacagcangnangcacatcn

SEQ ID NO: 485 - DNA, 21 bp, Artificial Sequence
  Synthetic
  misc_feature (9)..(9): n is 5-[N-(1-naphthylmethyl)carboxyamide]-2'-deoxyuridine
  misc_feature (11)..(11): n is 5-[N-(1-naphthylmethyl)carboxyamide]-2'-deoxyuridine
  misc_feature (13)..(13): n is 5-[N-(1-naphthylmethyl)carboxyamide]-2'-deoxyuridine
  misc_feature (19)..(19): n is 5-[N-(1-naphthylmethyl)carboxyamide]-2'-deoxyuridine
cgacagcangnangcacanct

SEQ ID NO: 486 - DNA, 21 bp, Artificial Sequence
  Synthetic
  misc_feature (7)..(7): n is 2'-O-methyl-cytidine
  misc_feature (9)..(9): n is 5-[N-(1-naphthylmethyl)carboxyamide]-2'-deoxyuridine
  misc_feature (11)..(11): n is 5-[N-(1-naphthylmethyl)carboxyamide]-2'-deoxyuridine
  misc_feature (13)..(13): n is 5-[N-(1-naphthylmethyl)carboxyamide]-2'-deoxyuridine
  misc_feature (16)..(16): n is 2'-O-methyl-adenosine
  misc_feature (18)..(18): n is 2'-O-methyl-adenosine
  misc_feature (19)..(19): n is 5-[N-(1-naphthylmethyl)carboxyamide]-2'-deoxyuridine
  misc_feature (21)..(21): n is 5-[N-(1-naphthylmethyl)carboxyamide]-2'-deoxyuridine
cgacagnangnangcncnncn

SEQ ID NO: 487 - DNA, 21 bp, Artificial Sequence
  Synthetic
  misc_feature (7)..(7): n is 2'-O-methyl-cytidine
  misc_feature (9)..(9): n is 5-[N-(1-naphthylmethyl)carboxyamide]-2'-deoxyuridine
  misc_feature (11)..(11): n is 5-[N-(1-naphthylmethyl)carboxyamide]-2'-deoxyuridine
  misc_feature (13)..(13): n is 5-[N-(1-naphthylmethyl)carboxyamide]-2'-deoxyuridine
  misc_feature (14)..(14): n is 2'-O-methyl-guanosine
  misc_feature (16)..(16): n is 2'-O-methyl-adenosine
  misc_feature (18)..(18): n is 2'-O-methyl-adenosine
  misc_feature (19)..(19): n is 5-[N-(1-naphthylmethyl)carboxyamide]-2'-deoxyuridine
  misc_feature (21)..(21): n is 5-[N-(1-naphthylmethyl)carboxyamide]-2'-deoxyuridine
cgacagnangnanncncnncn

SEQ ID NO: 488 - DNA, 21 bp, Artificial Sequence
  Synthetic
  misc_feature (6)..(6): n is 2'-O-methyl-guanosine
  misc_feature (7)..(7): n is 2'-O-methyl-cytidine
  misc_feature (9)..(9): n is 5-[N-(1-naphthylmethyl)carboxyamide]-2'-deoxyuridine
  misc_feature (11)..(11): n is 5-[N-(1-naphthylmethyl)carboxyamide]-2'-deoxyuridine
  misc_feature (13)..(13): n is 5-[N-(1-naphthylmethyl)carboxyamide]-2'-deoxyuridine
  misc_feature (14)..(14): n is 2'-O-methyl-guanosine
  misc_feature (16)..(16): n is 2'-O-methyl-adenosine
  misc_feature (18)..(18): n is 2'-O-methyl-adenosine
  misc_feature (19)..(19): n is 5-[N-(1-naphthylmethyl)carboxyamide]-2'-deoxyuridine
  misc_feature (20)..(20): n is 2'-O-methyl-cytidine
  misc_feature (21)..(21): n is 5-[N-(1-naphthylmethyl)carboxyamide]-2'- O-methyl-uridine
cgacannangnanncncnnnn

SEQ ID NO: 489 - DNA, 21 bp, Artificial Sequence
  Synthetic
  misc_feature (1)..(1): n is 2'-O-methyl-cytidine
  misc_feature (6)..(6): n is 2'-O-methyl-guanosine
  misc_feature (7)..(7): n is 2'-O-methyl-cytidine
  misc_feature (9)..(9): n is 5-[N-(1-naphthylmethyl)carboxyamide]-2'-deoxyuridine
  misc_feature (11)..(11): n is 5-[N-(1-naphthylmethyl)carboxyamide]-2'-deoxyuridine
  misc_feature (13)..(13): n is 5-[N-(1-naphthylmethyl)carboxyamide]-2'-deoxyuridine
  misc_feature (14)..(14): n is 2'-O-methyl-guanosine
  misc_feature (15)..(15): n is 2'-O-methyl-cytidine
  misc_feature (16)..(16): n is 2'-O-methyl-adenosine
  misc_feature (18)..(18): n is 2'-O-methyl-adenosine
  misc_feature (19)..(19): n is 5-[N-(1-naphthylmethyl)carboxyamide]-2'-deoxyuridine
  misc_feature (20)..(20): n is 2'-O-methyl-cytidine
  misc_feature (21)..(21): n is 5-[N-(1-naphthylmethyl)carboxyamide]-2'- O-methyl-uridine
ngacannangnannnncnnnn

SEQ ID NO: 490 - DNA, 21 bp, Artificial Sequence
  Synthetic
  misc_feature (1)..(1): n is 2'-O-methyl-cytidine
  misc_feature (4)..(4): n is 2'-O-methyl-cytidine
  misc_feature (6)..(6): n is 2'-O-methyl-guanosine
  misc_feature (7)..(7): n is 2'-O-methyl-cytidine
  misc_feature (9)..(9): n is 5-[N-(1-naphthylmethyl)carboxyamide]-2'-deoxyuridine
  misc_feature (11)..(11): n is 5-[N-(1-naphthylmethyl)carboxyamide]-2'-deoxyuridine
  misc_feature (13)..(13): n is 5-[N-(1-naphthylmethyl)carboxyamide]-2'-deoxyuridine
  misc_feature (14)..(14): n is 2'-O-methyl-guanosine
  misc_feature (15)..(15): n is 2'-O-methyl-cytidine
  misc_feature (16)..(16): n is 2'-O-methyl-adenosine
  misc_feature (18)..(18): n is 2'-O-methyl-adenosine
  misc_feature (19)..(19): n is 5-[N-(1-naphthylmethyl)carboxyamide]-2'-deoxyuridine
  misc_feature (20)..(20): n is 2'-O-methyl-cytidine
  misc_feature (21)..(21): n is 5-[N-(1-naphthylmethyl)carboxyamide]-2'- O-methyl-uridine
nganannangnannnncnnnn

SEQ ID NO: 491 - DNA, 21 bp, Artificial Sequence
  Synthetic
  misc_feature (1)..(1): n is 2'-O-methyl-cytidine
  misc_feature (4)..(4): n is 2'-O-methyl-cytidine
  misc_feature (6)..(6): n is 2'-O-methyl-guanosine
  misc_feature (7)..(7): n is 2'-O-methyl-cytidine
  misc_feature (9)..(9): n is 5-[N-(1-naphthylmethyl)carboxyamide]-2'-deoxyuridine
  misc_feature (11)..(11): n is 5-[N-(1-naphthylmethyl)carboxyamide]-2'- O-methyl-uridine
  misc_feature (13)..(13): n is 5-[N-(1-naphthylmethyl)carboxyamide]-2'-deoxyuridine
  misc_feature (14)..(14): n is 2'-O-methyl-guanosine
  misc_feature (15)..(15): n is 2'-O-methyl-cytidine
  misc_feature (16)..(16): n is 2'-O-methyl-adenosine
  misc_feature (17)..(17): n is 2'-O-methyl-cytidine
  misc_feature (18)..(18): n is 2'-O-methyl-adenosine
  misc_feature (19)..(19): n is 5-[N-(1-naphthylmethyl)carboxyamide]-2'-deoxyuridine
  misc_feature (20)..(20): n is 2'-O-methyl-cytidine
  misc_feature (21)..(21): n is 5-[N-(1-naphthylmethyl)carboxyamide]-2'- O-methyl-uridine
nganannangnannnnnnnnn

SEQ ID NO: 492 - DNA, 21 bp, Artificial Sequence
  Synthetic
  misc_feature (1)..(1): n is 2'-O-methyl-cytidine
  misc_feature (2)..(2): n is 2'-O-methyl-guanosine
  misc_feature (4)..(4): n is 2'-O-methyl-cytidine
  misc_feature (6)..(6): n is 2'-O-methyl-guanosine
  misc_feature (7)..(7): n is 2'-O-methyl-cytidine
  misc_feature (9)..(9): n is 5-[N-(1-naphthylmethyl)carboxyamide]-2'-deoxyuridine
  misc_feature (11)..(11): n is 5-[N-(1-naphthylmethyl)carboxyamide]-2'- O-methyl-uridine
  misc_feature (13)..(13): n is 5-[N-(1-naphthylmethyl)carboxyamide]-2'-deoxyuridine
  misc_feature (14)..(14): n is 2'-O-methyl-guanosine
  misc_feature (15)..(15): n is 2'-O-methyl-cytidine
  misc_feature (16)..(16): n is 2'-O-methyl-adenosine
  misc_feature (17)..(17): n is 2'-O-methyl-cytidine
  misc_feature (18)..(18): n is 2'-O-methyl-adenosine
  misc_feature (19)..(19): n is 5-[N-(1-naphthylmethyl)carboxyamide]-2'-deoxyuridine
  misc_feature (20)..(20): n is 2'-O-methyl-cytidine
  misc_feature (21)..(21): n is 5-[N-(1-naphthylmethyl)carboxyamide]-2'- O-methyl-uridine
nnanannangnannnnnnnnn

SEQ ID NO: 493 - DNA, 21 bp, Artificial Sequence
  Synthetic
  misc_feature (1)..(1): n is 2'-O-methyl-cytidine
  misc_feature (2)..(2): n is 2'-O-methyl-guanosine
  misc_feature (4)..(4): n is 2'-O-methyl-cytidine
  misc_feature (6)..(6): n is 2'-O-methyl-guanosine
  misc_feature (7)..(7): n is 2'-O-methyl-cytidine
  misc_feature (9)..(9): n is 5-[N-(1-naphthylmethyl)carboxyamide]-2'-deoxyuridine
  misc_feature (10)..(10): n is 2'-O-methyl-guanosine
  misc_feature (11)..(11): n is 5-[N-(1-naphthylmethyl)carboxyamide]-2'- O-methyl-uridine
  misc_feature (12)..(12): n is 2'-O-methyl-adenosine
  misc_feature (13)..(13): n is 5-[N-(1-naphthylmethyl)carboxyamide]-2'-deoxyuridine
  misc_feature (14)..(14): n is 2'-O-methyl-guanosine
  misc_feature (15)..(15): n is 2'-O-methyl-cytidine
  misc_feature (16)..(16): n is 2'-O-methyl-adenosine
  misc_feature (17)..(17): n is 2'-O-methyl-cytidine
  misc_feature (18)..(18): n is 2'-O-methyl-adenosine
  misc_feature (19)..(19): n is 5-[N-(1-naphthylmethyl)carboxyamide]-2'-deoxyuridine
  misc_feature (20)..(20): n is 2'-O-methyl-cytidine
  misc_feature (21)..(21): n is 5-[N-(1-naphthylmethyl)carboxyamide]-2'- O-methyl-uridine
nnanannannnnnnnnnnnnn

SEQ ID NO: 494 - DNA, 21 bp, Artificial Sequence
  Synthetic
  misc_feature (1)..(1): n is 2'-O-methyl-cytidine
  misc_feature (2)..(2): n is 2'-O-methyl-guanosine
  misc_feature (3)..(3): n is 2'-O-methyl-adenosine
  misc_feature (4)..(4): n is 2'-O-methyl-cytidine
  misc_feature (6)..(6): n is 2'-O-methyl-guanosine
  misc_feature (7)..(7): n is 2'-O-methyl-cytidine
  misc_feature (9)..(9): n is 5-[N-(1-naphthylmethyl)carboxyamide]-2'-deoxyuridine
  misc_feature (10)..(10): n is 2'-O-methyl-guanosine
  misc_feature (11)..(11): n is 5-[N-(1-naphthylmethyl)carboxyamide]-2'- O-methyl-uridine
  misc_feature (12)..(12): n is 2'-O-methyl-adenosine
  misc_feature (13)..(13): n is 5-[N-(1-naphthylmethyl)carboxyamide]-2'-deoxyuridine
  misc_feature (14)..(14): n is 2'-O-methyl-guanosine
  misc_feature (15)..(15): n is 2'-O-methyl-cytidine
  misc_feature (16)..(16): n is 2'-O-methyl-adenosine
  misc_feature (17)..(17): n is 2'-O-methyl-cytidine
  misc_feature (18)..(18): n is 2'-O-methyl-adenosine
  misc_feature (19)..(19): n is 5-[N-(1-naphthylmethyl)carboxyamide]-2'-deoxyuridine
  misc_feature (20)..(20): n is 2'-O-methyl-cytidine
  misc_feature (21)..(21): n is 5-[N-(1-naphthylmethyl)carboxyamide]-2'- O-methyl-uridine
nnnnannannnnnnnnnnnnn

SEQ ID NO: 495 - DNA, 21 bp, Artificial Sequence
  Synthetic
  misc_feature (1)..(1): n is 2'-O-methyl-cytidine
  misc_feature (2)..(2): n is 2'-O-methyl-guanosine
  misc_feature (3)..(3): n is 2'-O-methyl-adenosine
  misc_feature (4)..(4): n is 2'-O-methyl-cytidine
  misc_feature (6)..(6): n is 2'-O-methyl-guanosine
  misc_feature (7)..(7): n is 2'-O-methyl-cytidine
  misc_feature (9)..(9): n is 5-[N-(1-naphthylmethyl)carboxyamide]-2'-deoxyuridine
  misc_feature (10)..(10): n is 2'-O-methyl-guanosine
  misc_feature (11)..(11): n is 5-[N-(1-naphthylmethyl)carboxyamide]-2'- O-methyl-uridine
  misc_feature (12)..(12): n is 2'-O-methyl-adenosine
  misc_feature (13)..(13): n is 5-[N-(1-naphthylmethyl)carboxyamide]-2'- O-methyl-uridine
  misc_feature (14)..(14): n is 2'-O-methyl-guanosine
  misc_feature (15)..(15): n is 2'-O-methyl-cytidine
  misc_feature (16)..(16): n is 2'-O-methyl-adenosine
  misc_feature (17)..(17): n is 2'-O-methyl-cytidine
  misc_feature (18)..(18): n is 2'-O-methyl-adenosine
  misc_feature (19)..(19): n is 5-[N-(1-naphthylmethyl)carboxyamide]-2'- O-methyl-uridine
  misc_feature (20)..(20): n is 2'-O-methyl-cytidine
  misc_feature (21)..(21): n is 5-[N-(1-naphthylmethyl)carboxyamide]-2'- O-methyl-uridine
nnnnannannnnnnnnnnnnn

SEQ ID NO: 496 - DNA, 21 bp, Artificial Sequence
  Synthetic
  misc_feature (1)..(1): n is 2'-O-methyl-cytidine
  misc_feature (2)..(2): n is 2'-O-methyl-guanosine
  misc_feature (3)..(3): n is 2'-O-methyl-adenosine
  misc_feature (4)..(4): n is 2'-O-methyl-cytidine
  misc_feature (5)..(5): n is 2'-O-methyl-adenosine
  misc_feature (6)..(6): n is 2'-O-methyl-guanosine
  misc_feature (7)..(7): n is 2'-O-methyl-cytidine
  misc_feature (9)..(9): n is 5-[N-(1-naphthylmethyl)carboxyamide]-2'- O-methyl-uridine
  misc_feature (10)..(10): n is 2'-O-methyl-guanosine
  misc_feature (11)..(11): n is 5-[N-(1-naphthylmethyl)carboxyamide]-2'- O-methyl-uridine
  misc_feature (12)..(12): n is 2'-O-methyl-adenosine
  misc_feature (13)..(13): n is 5-[N-(1-naphthylmethyl)carboxyamide]-2'- O-methyl-uridine
  misc_feature (14)..(14): n is 2'-O-methyl-guanosine
  misc_feature (15)..(15): n is 2'-O-methyl-cytidine
  misc_feature (16)..(16): n is 2'-O-methyl-adenosine
  misc_feature (17)..(17): n is 2'-O-methyl-cytidine
  misc_feature (18)..(18): n is 2'-O-methyl-adenosine
  misc_feature (19)..(19): n is 5-[N-(1-naphthylmethyl)carboxyamide]-2'- O-methyl-uridine
  misc_feature (20)..(20): n is 2'-O-methyl-cytidine
  misc_feature (21)..(21): n is 5-[N-(1-naphthylmethyl)carboxyamide]-2'- O-methyl-uridine
nnnnnnnannnnnnnnnnnnn

SEQ ID NO: 497 - DNA, 21 bp, Artificial Sequence
  Synthetic
  misc_feature (1)..(1): n is 2'-O-methyl-cytidine
  misc_feature (2)..(2): n is 2'-O-methyl-guanosine
  misc_feature (3)..(3): n is 2'-O-methyl-adenosine
  misc_feature (4)..(4): n is 2'-O-methyl-cytidine
  misc_feature (5)..(5): n is 2'-O-methyl-adenosine
  misc_feature (6)..(6): n is 2'-O-methyl-guanosine
  misc_feature (7)..(7): n is 2'-O-methyl-cytidine
  misc_feature (8)..(8): n is 2'-O-methyl-adenosine
  misc_feature (9)..(9): n is 5-[N-(1-naphthylmethyl)carboxyamide]-2'- O-methyl-uridine
  misc_feature (10)..(10): n is 2'-O-methyl-guanosine
  misc_feature (11)..(11): n is 5-[N-(1-naphthylmethyl)carboxyamide]-2'- O-methyl-uridine
  misc_feature (12)..(12): n is 2'-O-methyl-adenosine
  misc_feature (13)..(13): n is 5-[N-(1-naphthylmethyl)carboxyamide]-2'- O-methyl-uridine
  misc_feature (14)..(14): n is 2'-O-methyl-guanosine
  misc_feature (15)..(15): n is 2'-O-methyl-cytidine
  misc_feature (16)..(16): n is 2'-O-methyl-adenosine
  misc_feature (17)..(17): n is 2'-O-methyl-cytidine
  misc_feature (18)..(18): n is 2'-O-methyl-adenosine
  misc_feature (19)..(19): n is 5-[N-(1-naphthylmethyl)carboxyamide]-2'- O-methyl-uridine
  misc_feature (20)..(20): n is 2'-O-methyl-cytidine
  misc_feature (21)..(21): n is 5-[N-(1-naphthylmethyl)carboxyamide]-2'- O-methyl-uridine
nnnnnnnnnnnnnnnnnnnnn

SEQ ID NO: 498 - DNA, 21 bp, Artificial Sequence
  Synthetic
  misc_feature (1)..(1): n is 2'-O-methyl-cytidine
  misc_feature (7)..(7): n is 2'-O-methyl-cytidine
  misc_feature (9)..(9): n is 5-[N-(1-naphthylmethyl)carboxyamide]-2'-deoxyuridine
  misc_feature (11)..(11): n is 5-[N-(1-naphthylmethyl)carboxyamide]-2'-deoxyuridine
  misc_feature (13)..(13): n is 5-[N-(1-naphthylmethyl)carboxyamide]-2'-deoxyuridine
  misc_feature (15)..(15): n is 2'-O-methyl-cytidine
  misc_feature (16)..(16): n is 2'-O-methyl-adenosine
  misc_feature (18)..(18): n is 2'-O-methyl-adenosine
  misc_feature (19)..(19): n is 5-[N-(1-naphthylmethyl)carboxyamide]-2'-deoxyuridine
  misc_feature (20)..(20): n is 2'-O-methyl-cytidine
  misc_feature (21)..(21): n is 5-[N-(1-naphthylmethyl)carboxyamide]-2'- O-methyl-uridine
ngacagnangnangnncnnnn

SEQ ID NO: 499 - DNA, 21 bp, Artificial Sequence
  Synthetic
  misc_feature (6)..(6): n is 2'-O-methyl-guanosine
  misc_feature (9)..(9): n is 5-[N-(1-naphthylmethyl)carboxyamide]-2'-deoxyuridine
  misc_feature (11)..(11): n is 5-[N-(1-naphthylmethyl)carboxyamide]-2'-deoxyuridine
  misc_feature (13)..(13): n is 5-[N-(1-naphthylmethyl)carboxyamide]-2'-deoxyuridine
  misc_feature (18)..(18): n is 2'-O-methyl-adenosine
  misc_feature (19)..(19): n is 5-[N-(1-naphthylmethyl)carboxyamide]-2'-deoxyuridine
  misc_feature (20)..(20): n is 2'-O-methyl-cytidine
  misc_feature (21)..(21): n is 5-[N-(1-naphthylmethyl)carboxyamide]-2'-deoxyuridine
cgacancangnangcacnnnn

SEQ ID NO: 500 - DNA, 24 bp, Artificial Sequence
  Synthetic
  misc_feature (1)..(1): n is a naturally occurring or modified nucleotide
  misc_feature (2)..(2): n is a modified pyrimidine
  misc_feature (5)..(5): n is Ln, wherein L is a spacer selected from a naturally occurring or modified nucleotide, a hydrocarbon linker, a polyethylene glycol linker or a combination thereof; n is 0 to 20
  misc_feature (6)..(6): n is C or G, and is complementary to the nucleotide at position 4
  misc_feature (7)..(7): n is C, G or a modified pyrimidine, and is complementary to the nucleotide at position 3
  misc_feature (8)..(8): n is a modified pyrimidine
  misc_feature (11)..(11): n is a naturally occurring or modified nucleotide
  misc_feature (12)..(12): n is Nm, wherein N is a naturally occurring or modified nucleotide; m is 0 to 20
  misc_feature (16)..(18): n is a modified pyrimidine
  misc_feature (20)..(20): n is a modified pyrimidine
nnvsnnnnacnngcgnnnanagcg

SEQ ID NO: 501 - DNA, 24 bp, Artificial Sequence
  Synthetic
  misc_feature (1)..(2): n is a modified pyrimidine
  misc_feature (5)..(5): n is Ln, wherein L is a spacer selected from a naturally occurring or modified nucleotide, a hydrocarbon linker, a polyethylene glycol linker or a combination thereof; n is 0 to 20
  misc_feature (6)..(6): n is C or G, and is complementary to the nucleotide at position 4
  misc_feature (7)..(7): n is C, G or a modified pyrimidine, and is complementary to the nucleotide at position 3
  misc_feature (8)..(8): n is a modified pyrimidine
  misc_feature (11)..(11): n is a naturally occurring or modified nucleotide
  misc_feature (12)..(12): n is Nm, wherein N is a naturally occurring or modified nucleotide; m is 0 to 20
  misc_feature (16)..(18): n is a modified pyrimidine
  misc_feature (20)..(20): n is a modified pyrimidine
nnvsnnnnacnngcgnnnanagcg

SEQ ID NO: 502 - DNA, 24 bp, Artificial Sequence
  Synthetic
  misc_feature (1)..(2): n is a modified pyrimidine
  misc_feature (5)..(5): n is Ln, wherein L is a spacer selected from a substituted or unsubstituted C2-C20 linker and a modified or unmodified nucleotide, a naturally occurring or modified nucleotide, a hydrocarbon linker, a polyethylene glycol linker or a combination
  misc_feature (7)..(7): n is C, G or a modified pyrimidine, and is complementary to the nucleotide at position 3
  misc_feature (8)..(8): n is a modified pyrimidine
  misc_feature (11)..(11): n is a naturally occurring or modified nucleotide
  misc_feature (16)..(18): n is a modified pyrimidine
  misc_feature (20)..(20): n is a modified pyrimidine
nnvcngnnacnmgcgnnnanagcg

SEQ ID NO: 503 - DNA, 24 bp, Artificial Sequence
  Synthetic
  misc_feature (1)..(2): n is a modified pyrimidine
  misc_feature (5)..(5): n is Ln, wherein L is a spacer selected from a naturally occurring or modified nucleotide, a hydrocarbon linker, a polyethylene glycol linker or a combination thereof; n is 0 to 20
  misc_feature (7)..(8): n is a modified pyrimidine
  misc_feature (16)..(18): n is a modified pyrimidine
  misc_feature (20)..(20): n is a modified pyrimidine
nnacngnnacacgcgnnnanagcg

SEQ ID NO: 504 - DNA, 29 bp, Artificial Sequence
  Synthetic
  misc_feature (1)..(2): n is a modified pyrimidine
  misc_feature (8)..(8): n is a modified pyrimidine
  misc_feature (12)..(13): n is a modified pyrimidine
  misc_feature (21)..(23): n is a modified pyrimidine
  misc_feature (25)..(25): n is a modified pyrimidine
nnacgacnacgnnacacgcgnnnanagcg

SEQ ID NO: 505 - DNA, 20 bp, Artificial Sequence
  Synthetic
  misc_feature (1)..(1): n is a modified pyrimidine
  misc_feature (3)..(3): n is C, or a substituted or unsubstituted C2-C10 linker
  misc_feature (4)..(4): n is Lp, wherein L is independently selected from a substituted or unsubstituted C2-C10 linker, a polyethylene glycol linker, and a modified or unmodified nucleotide; p is 1 to 10
  misc_feature (6)..(6): n is a modified or unmodified pyrimidine
  misc_feature (7)..(7): n is a modified pyrimidine
  misc_feature (9)..(9): n is C, or a substituted or unsubstituted C2-C10 linker
  misc_feature (10)..(10): n is Kq, wherein K is independently selected from a substituted or unsubstituted C2-C10 linker, a polyethylene glycol linker, and a modified or unmodified nucleotide; q is 1 to 5
  misc_feature (14)..(15): n is a modified pyrimidine
  misc_feature (16)..(16): n is a modified or unmodified pyrimidine
  misc_feature (17)..(17): n is A, or a substituted or unsubstituted C2-C10 linker
  misc_feature (18)..(18): n is a modified or unmodified pyrimidine
nanngnnanngcgnnnnnag

SEQ ID NO: 506 - DNA, 23 bp, Artificial Sequence
  Synthetic
  misc_feature (1)..(1): n is a modified or unmodified pyrimidine, a substituted or unsubstituted C2-C10 linker, or is absent
  misc_feature (2)..(2): n is a modified pyrimidine
  misc_feature (4)..(4): n is C, or a substituted or unsubstituted C2-C10 linker
  misc_feature (5)..(5): n is Lp, wherein L is independently selected from a substituted or unsubstituted C2-C10 linker, a polyethylene glycol linker, and a modified or unmodified nucleotide; p is 1 to 10
  misc_feature (7)..(7): n is a modified or unmodified pyrimidine
  misc_feature (8)..(8): n is a modified pyrimidine
  misc_feature (10)..(10): n is C, or a substituted or unsubstituted C2-C10 linker
  misc_feature (11)..(11): n is Kq, wherein K is independently selected from a substituted or unsubstituted C2-C10 linker, a polyethylene glycol linker, and a modified or unmodified nucleotide; q is 1 to 5
  misc_feature (15)..(16): n is a modified pyrimidine
  misc_feature (17)..(17): n is a modified or unmodified pyrimidine
  misc_feature (18)..(18): n is A, or a substituted or unsubstituted C2-C10 linker
  misc_feature (19)..(19): n is a modified or unmodified pyrimidine
  misc_feature (22)..(22): n is C, or a substituted or unsubstituted C2-C10 linker
  misc_feature (23)..(23): n is G, a substituted or unsubstituted C2-C10 linker, or is absent
nnanngnnanngcgnnnnnagnn

SEQ ID NO: 507 - DNA, 21 bp, Artificial Sequence
  Synthetic
  misc_feature (1)..(1): n is a modified pyrimidine
  misc_feature (4)..(4): n is Ln, wherein L is selected from a substituted or unsubstituted C2-C20 linker and a modified or unmodified nucleotide; n is 1 to 50
  misc_feature (5)..(5): n is a C or G, is complementary to the nucleotide at position 3
  misc_feature (6)..(6): n is a C, G or a modified pyrimidine, and is complementary to the nucleotide at position 2
  misc_feature (7)..(7): n is a modified pyrimidine
  misc_feature (10)..(10): n is a modified or unmodified nucleotide
  misc_feature (11)..(11): n is Nm, N is a modified or unmodified nucleotide; m is 0 to 50
  misc_feature (15)..(17): n is a modified pyrimidine
  misc_feature (19)..(19): n is a modified pyrimidine
nvsnnnnacnngcgnnnanag

SEQ ID NO: 508 - DNA, 23 bp, Artificial Sequence
  Synthetic
  misc_feature (1)..(1): n is a modified pyrimidine or dT
  misc_feature (2)..(2): n is a modified pyrimidine
  misc_feature (5)..(5): n is Ln, wherein L is selected from a substituted or unsubstituted C2-C20 linker and a modified or unmodified nucleotide; n is 1 to 50
  misc_feature (6)..(6): n is a C or G, is complementary to the nucleotide at position 4
  misc_feature (7)..(7): n is a C, G or Z, and is complementary to the nucleotide at position 3
  misc_feature (8)..(8): n is a modified pyrimidine
  misc_feature (11)..(11): n is a modified or unmodified nucleotide
  misc_feature (12)..(12): n is Nm, N is a modified or unmodified nucleotide; m is 0 to 50
  misc_feature (16)..(18): n is a modified pyrimidine
  misc_feature (20)..(20): n is a modified pyrimidine
nnvsnnnnacnngcgnnnanagc

SEQ ID NO: 509 - DNA, 23 bp, Artificial Sequence
  Synthetic
  misc_feature (1)..(1): n is a modified pyrimidine or dT
  misc_feature (2)..(2): n is a modified pyrimidine
  misc_feature (5)..(5): n is Ln, wherein L is selected from a substituted or unsubstituted C2-C20 linker and a modified or unmodified nucleotide; n is 1 to 50
  misc_feature (7)..(7): n is C, G or Z, and is complementary to the nucleotide at position 3
  misc_feature (8)..(8): n is a modified pyrimidine
  misc_feature (11)..(11): n is a modified or unmodified nucleotide
  misc_feature (16)..(18): n is a modified pyrimidine
  misc_feature (20)..(20): n is a modified pyrimidine
nnvcngnnacnmgcgnnnanagc

SEQ ID NO: 510 - DNA, 23 bp, Artificial Sequence
  Synthetic
  misc_feature (1)..(1): n is a modified pyrimidine or dT
  misc_feature (2)..(2): n is a modified pyrimidine
  misc_feature (5)..(5): n is Ln, wherein L is selected from a substituted or unsubstituted C2-C20 linker and a modified or unmodified nucleotide; n is 1 to 50
  misc_feature (7)..(8): n is a modified pyrimidine
  misc_feature (16)..(18): n is a modified pyrimidine
  misc_feature (20)..(20): n is a modified pyrimidine
nnacngnnacacgcgnnnanagc

SEQ ID NO: 511 - DNA, 28 bp, Artificial Sequence
  Synthetic
  misc_feature (1)..(1): n is a modified pyrimidine or dT
  misc_feature (2)..(2): n is a modified pyrimidine
  misc_feature (8)..(8): n is a modified pyrimidine
  misc_feature (12)..(13): n is a modified pyrimidine
  misc_feature (21)..(23): n is a modified pyrimidine
  misc_feature (25)..(25): n is a modified pyrimidine
nnacgacnacgnnacacgcgnnnanagc

SEQ ID NO: 512 - DNA, 14 bp, Artificial Sequence
  Synthetic
  misc_feature (4)..(4): n is Ln, wherein L is a substituted or unsubstituted C2-C50 linker, a polyethylene glycol linker, or a modified or unmodified nucleotide; n is 1 to 5
  misc_feature (5)..(5): n is a modified pyrimidine
  misc_feature (7)..(7): n is a modified pyrimidine
  misc_feature (9)..(9): n is a modified pyrimidine
  misc_feature (11)..(11): n is Lm, wherein L is a substituted or unsubstituted C2-C50 linker, a polyethylene glycol linker, or a modified or unmodified nucleotide; m is 1 to 10
  misc_feature (12)..(12): n is a modified pyrimidine
  misc_feature (13)..(13): n is a substituted or unsubstituted C2-C50 linker, a polyethylene glycol linker, or a modified or unmodified nucleotide
  misc_feature (14)..(14): n is a modified pyrimidine
acanngnangnnnn

SEQ ID NO: 513 - DNA, 27 bp, Artificial Sequence
  Synthetic
  misc_feature (2)..(3): n is a modified pyrimidine
  misc_feature (4)..(4): n is a modified or unmodified nucleotide, a substituted or unsubstituted C2-C50 linker, or is absent
  misc_feature (7)..(7): n is G, or a substituted or unsubstituted C2-C50 linker
  misc_feature (8)..(8): n is a modified pyrimidine
  misc_feature (9)..(9): n is G, or a substituted or unsubstituted C2-C50 linker
  misc_feature (11)..(12): n is a modified pyrimidine
  misc_feature (13)..(13): n is G, or a substituted or unsubstituted C2-C50 linker
  misc_feature (14)..(14): n is a modified pyrimidine
  misc_feature (15)..(15): n is A, or a substituted or unsubstituted C2-C50 linker
  misc_feature (16)..(16): n is a modified or unmodified nucleotide, a substituted or unsubstituted C2-C50 linker
  misc_feature (19)..(21): n is a modified pyrimidine
  misc_feature (25)..(25): n is a modified pyrimidine
gnnnaannncnnnnnngannnaaangg

SEQ ID NO: 514 - DNA, 27 bp, Artificial Sequence
  Synthetic
  misc_feature (3)..(4): n is a modified pyrimidine
  misc_feature (5)..(5): n is a modified or unmodified nucleotide, a substituted or unsubstituted C2-C50 linker, or is absent
  misc_feature (8)..(8): n is G, or a substituted or unsubstituted C2-C50 linker
  misc_feature (9)..(9): n is a modified pyrimidine
  misc_feature (10)..(10): n is G, or a substituted or unsubstituted C2-C50 linker
  misc_feature (12)..(13): n is a modified pyrimidine
  misc_feature (14)..(14): n is G, or a substituted or unsubstituted C2-C50 linker
  misc_feature (15)..(15): n is a modified pyrimidine
  misc_feature (16)..(16): n is A, or a substituted or unsubstituted C2-C50 linker
  misc_feature (17)..(17): n is a modified or unmodified nucleotide, a substituted or unsubstituted C2-C50 linker
  misc_feature (20)..(22): n is a modified pyrimidine
  misc_feature (26)..(26): n is a modified pyrimidine
cgnnnaannncnnnnnngannnaaang

SEQ ID NO: 515 - DNA, 28 bp, Artificial Sequence
  Synthetic
  misc_feature (3)..(4): n is a modified pyrimidine
  misc_feature (5)..(5): n is a modified or unmodified nucleotide, a substituted or unsubstituted C2-C50 linker, or is absent
  misc_feature (8)..(8): n is G, or a substituted or unsubstituted C2-C50 linker
  misc_feature (9)..(9): n is a modified pyrimidine
  misc_feature (10)..(10): n is G, or a substituted or unsubstituted C2-C50 linker
  misc_feature (12)..(13): n is a modified pyrimidine
  misc_feature (14)..(14): n is G, or a substituted or unsubstituted C2-C50 linker
  misc_feature (15)..(15): n is a modified pyrimidine
  misc_feature (16)..(16): n is A, or a substituted or unsubstituted C2-C50 linker
  misc_feature (17)..(17): n is a modified or unmodified nucleotide, a substituted or unsubstituted C2-C50 linker
  misc_feature (20)..(22): n is a modified pyrimidine
  misc_feature (26)..(26): n is a modified pyrimidine
cgnnnaannncnnnnnngannnaaangg

SEQ ID NO: 516 - DNA, 29 bp, Artificial Sequence
  Synthetic
  misc_feature (4)..(5): n is a modified pyrimidine
  misc_feature (6)..(6): n is a modified or unmodified nucleotide, a substituted or unsubstituted C2-C50 linker, or is absent
  misc_feature (9)..(9): n is G, or a substituted or unsubstituted C2-C50 linker
  misc_feature (10)..(10): n is a modified pyrimidine
  misc_feature (11)..(11): n is G, or a substituted or unsubstituted C2-C50 linker
  misc_feature (13)..(14): n is a modified pyrimidine
  misc_feature (15)..(15): n is G, or a substituted or unsubstituted C2-C50 linker
  misc_feature (16)..(16): n is a modified pyrimidine
  misc_feature (17)..(17): n is A, or a substituted or unsubstituted C2-C50 linker
  misc_feature (18)..(18): n is a modified or unmodified nucleotide, a substituted or unsubstituted C2-C50 linker
  misc_feature (21)..(23): n is a modified pyrimidine
  misc_feature (27)..(27): n is a modified pyrimidine
ccgnnnaannncnnnnnngannnaaangg

SEQ ID NO: 517 - DNA, 21 bp, Artificial Sequence
  Synthetic
  misc_feature (1)..(1): n is 2'-O-methyl-cytidine
  misc_feature (9)..(9): n is 5-[N-(1-naphthylmethyl)carboxyamide]-2'-deoxyuridine
  misc_feature (11)..(11): n is 5-[N-(1-naphthylmethyl)carboxyamide]-2'-deoxyuridine
  misc_feature (13)..(13): n is 5-[N-(1-naphthylmethyl)carboxyamide]-2'-deoxyuridine
  misc_feature (18)..(18): n is 2'-O-methyl-adenosine
  misc_feature (19)..(19): n is 5-[N-(1-naphthylmethyl)carboxyamide]-2'-deoxyuridine
  misc_feature (20)..(20): n is 2'-O-methyl-cytidine
  misc_feature (21)..(21): n is 5-[N-(1-naphthylmethyl)carboxyamide]-2'-deoxyuridine
ngacagcangnangcacnnnn

SEQ ID NO: 518 - DNA, 21 bp, Artificial Sequence
  Synthetic
  misc_feature (1)..(1): n is 2'-O-methyl-cytidine
  misc_feature (6)..(6): n is 2'-O-methyl-guanosine
  misc_feature (9)..(9): n is 5-[N-(1-naphthylmethyl)carboxyamide]-2'-deoxyuridine
  misc_feature (11)..(11): n is 5-[N-(1-naphthylmethyl)carboxyamide]-2'-deoxyuridine
  misc_feature (13)..(13): n is 5-[N-(1-naphthylmethyl)carboxyamide]-2'-deoxyuridine
  misc_feature (18)..(18): n is 2'-O-methyl-adenosine
  misc_feature (19)..(19): n is 5-[N-(1-naphthylmethyl)carboxyamide]-2'-deoxyuridine
  misc_feature (21)..(21): n is 5-[N-(1-naphthylmethyl)carboxyamide]-2'-deoxyuridine
ngacancangnangcacnncn

SEQ ID NO: 519 - DNA, 21 bp, Artificial Sequence
  Synthetic
  misc_feature (1)..(1): n is 2'-O-methyl-cytidine
  misc_feature (6)..(6): n is 2'-O-methyl-guanosine
  misc_feature (9)..(9): n is 5-[N-(1-naphthylmethyl)carboxyamide]-2'-deoxyuridine
  misc_feature (11)..(11): n is 5-[N-(1-naphthylmethyl)carboxyamide]-2'-deoxyuridine
  misc_feature (13)..(13): n is 5-[N-(1-naphthylmethyl)carboxyamide]-2'-deoxyuridine
  misc_feature (14)..(14): n is 2'-O-methyl-guanosine
  misc_feature (19)..(19): n is 5-[N-(1-naphthylmethyl)carboxyamide]-2'-deoxyuridine
  misc_feature (21)..(21): n is 5-[N-(1-naphthylmethyl)carboxyamide]-2'-deoxyuridine
ngacancangnanncacancn

SEQ ID NO: 520 - DNA, 21 bp, Artificial Sequence
  Synthetic
  misc_feature (1)..(1): n is 2'-O-methyl-cytidine
  misc_feature (6)..(6): n is 2'-O-methyl-guanosine
  misc_feature (9)..(9): n is 5-[N-(1-naphthylmethyl)carboxyamide]-2'-deoxyuridine
  misc_feature (11)..(11): n is 5-[N-(1-naphthylmethyl)carboxyamide]-2'-deoxyuridine
  misc_feature (13)..(13): n is 5-[N-(1-naphthylmethyl)carboxyamide]-2'-deoxyuridine
  misc_feature (16)..(16): n is 2'-O-methyl-adenosine
  misc_feature (19)..(19): n is 5-[N-(1-naphthylmethyl)carboxyamide]-2'-deoxyuridine
  misc_feature (21)..(21): n is 5-[N-(1-naphthylmethyl)carboxyamide]-2'-deoxyuridine
ngacancangnangcncancn

SEQ ID NO: 521 - DNA, 21 bp, Artificial Sequence
  Synthetic
  misc_feature (1)..(1): n is 2'-O-methyl-cytidine
  misc_feature (9)..(9): n is 5-[N-(1-naphthylmethyl)carboxyamide]-2'-deoxyuridine
  misc_feature (11)..(11): n is 5-[N-(1-naphthylmethyl)carboxyamide]-2'-deoxyuridine
  misc_feature (13)..(13): n is 5-[N-(1-naphthylmethyl)carboxyamide]-2'-deoxyuridine
  misc_feature (14)..(14): n is 2'-O-methyl-guanosine
  misc_feature (16)..(16): n is 2'-O-methyl-adenosine
  misc_feature (19)..(19): n is 5-[N-(1-naphthylmethyl)carboxyamide]-2'-deoxyuridine
  misc_feature (21)..(21): n is 5-[N-(1-naphthylmethyl)carboxyamide]-2'-deoxyuridine
ngacagcangnanncncancn

SEQ ID NO: 522 - DNA, 21 bp, Artificial Sequence
  Synthetic
  misc_feature (7)..(7): n is 2'-O-methyl-cytidine
  misc_feature (9)..(9): n is 5-[N-(1-naphthylmethyl)carboxyamide]-2'-deoxyuridine
  misc_feature (11)..(11): n is 5-[N-(1-naphthylmethyl)carboxyamide]-2'-deoxyuridine
  misc_feature (13)..(13): n is 5-[N-(1-naphthylmethyl)carboxyamide]-2'-deoxyuridine
  misc_feature (14)..(14): n is 2'-O-methyl-guanosine
  misc_feature (16)..(16): n is 2'-O-methyl-adenosine
  misc_feature (19)..(19): n is 5-[N-(1-naphthylmethyl)carboxyamide]-2'-deoxyuridine
  misc_feature (21)..(21): n is 5-[N-(1-naphthylmethyl)carboxyamide]-2'-deoxyuridine
cgacagnangnanncncancn

SEQ ID NO: 523 - DNA, 21 bp, Artificial Sequence
  Synthetic
  misc_feature (9)..(9): n is 5-[N-(1-naphthylmethyl)carboxyamide]-2'-deoxyuridine
  misc_feature (11)..(11): n is 5-[N-(1-naphthylmethyl)carboxyamide]-2'-deoxyuridine
  misc_feature (13)..(13): n is 5-[N-(1-naphthylmethyl)carboxyamide]-2'-deoxyuridine
  misc_feature (14)..(14): n is 2'-O-methyl-guanosine
  misc_feature (16)..(16): n is 2'-O-methyl-adenosine
  misc_feature (19)..(19): n is 5-[N-(1-naphthylmethyl)carboxyamide]-2'-deoxyuridine
  misc_feature (21)..(21): n is 5-[N-(1-naphthylmethyl)carboxyamide]-2'- O-methyl-uridine
cgacagcangnanncncancn

SEQ ID NO: 524 - DNA, 21 bp, Artificial Sequence
  Synthetic
  misc_feature (7)..(7): n is 2'-O-methyl-cytidine
  misc_feature (9)..(9): n is 5-[N-(1-naphthylmethyl)carboxyamide]-2'-deoxyuridine
  misc_feature (11)..(11): n is 5-[N-(1-naphthylmethyl)carboxyamide]-2'-deoxyuridine
  misc_feature (13)..(13): n is 5-[N-(1-naphthylmethyl)carboxyamide]-2'-deoxyuridine
  misc_feature (16)..(16): n is 2'-O-methyl-adenosine
  misc_feature (19)..(19): n is 5-[N-(1-naphthylmethyl)carboxyamide]-2'-deoxyuridine
  misc_feature (21)..(21): n is 5-[N-(1-naphthylmethyl)carboxyamide]-2'- O-methyl-uridine
cgacagnangnangcncancn

SEQ ID NO: 525 - DNA, 21 bp, Artificial Sequence
  Synthetic
  misc_feature (7)..(7): n is 2'-O-methyl-cytidine
  misc_feature (9)..(9): n is 5-[N-(1-naphthylmethyl)carboxyamide]-2'-deoxyuridine
  misc_feature (11)..(11): n is 5-[N-(1-naphthylmethyl)carboxyamide]-2'-deoxyuridine
  misc_feature (13)..(13): n is 5-[N-(1-naphthylmethyl)carboxyamide]-2'-deoxyuridine
  misc_feature (17)..(17): n is 2'-O-methyl-cytidine
  misc_feature (19)..(19): n is 5-[N-(1-naphthylmethyl)carboxyamide]-2'-deoxyuridine
  misc_feature (21)..(21): n is 5-[N-(1-naphthylmethyl)carboxyamide]-2'- O-methyl-uridine
cgacagnangnangcanancn

SEQ ID NO: 526 - DNA, 21 bp, Artificial Sequence
  Synthetic
  misc_feature (4)..(4): n is 2'-O-methyl-cytidine
  misc_feature (7)..(7): n is 2'-O-methyl-cytidine
  misc_feature (9)..(9): n is 5-[N-(1-naphthylmethyl)carboxyamide]-2'-deoxyuridine
  misc_feature (11)..(11): n is 5-[N-(1-naphthylmethyl)carboxyamide]-2'-deoxyuridine
  misc_feature (13)..(13): n is 5-[N-(1-naphthylmethyl)carboxyamide]-2'-deoxyuridine
  misc_feature (19)..(19): n is 5-[N-(1-naphthylmethyl)carboxyamide]-2'-deoxyuridine
  misc_feature (21)..(21): n is 5-[N-(1-naphthylmethyl)carboxyamide]-2'- O-methyl-uridine
cganagnangnangcacancn

SEQ ID NO: 527 - DNA, 21 bp, Artificial Sequence
  Synthetic
  misc_feature (4)..(4): n is 2'-O-methyl-cytidine
  misc_feature (9)..(9): n is 5-[N-(1-naphthylmethyl)carboxyamide]-2'-deoxyuridine
  misc_feature (11)..(11): n is 5-[N-(1-naphthylmethyl)carboxyamide]-2'-deoxyuridine
  misc_feature (13)..(13): n is 5-[N-(1-naphthylmethyl)carboxyamide]-2'-deoxyuridine
  misc_feature (17)..(17): n is 2'-O-methyl-cytidine
  misc_feature (19)..(19): n is 5-[N-(1-naphthylmethyl)carboxyamide]-2'-deoxyuridine
  misc_feature (21)..(21): n is 5-[N-(1-naphthylmethyl)carboxyamide]-2'-deoxyuridine
cganagcangnangcanancn

SEQ ID NO: 528 - DNA, 21 bp, Artificial Sequence
  Synthetic
  misc_feature (4)..(4): n is 2'-O-methyl-cytidine
  misc_feature (9)..(9): n is 5-[N-(1-naphthylmethyl)carboxyamide]-2'-deoxyuridine
  misc_feature (11)..(11): n is 5-[N-(1-naphthylmethyl)carboxyamide]-2'-deoxyuridine
  misc_feature (12)..(12): n is 2'-O-methyl-adenosine
  misc_feature (13)..(13): n is 5-[N-(1-naphthylmethyl)carboxyamide]-2'-deoxyuridine
  misc_feature (17)..(17): n is 2'-O-methyl-cytidine
  misc_feature (19)..(19): n is 5-[N-(1-naphthylmethyl)carboxyamide]-2'-deoxyuridine
  misc_feature (21)..(21): n is 5-[N-(1-naphthylmethyl)carboxyamide]-2'-deoxyuridine
cganagcangnnngcanancn

SEQ ID NO: 529 - DNA, 21 bp, Artificial Sequence
  Synthetic
  misc_feature (2)..(2): n is 2'-O-methyl-guanosine
  misc_feature (4)..(4): n is 2'-O-methyl-cytidine
  misc_feature (9)..(9): n is 5-[N-(1-naphthylmethyl)carboxyamide]-2'-deoxyuridine
  misc_feature (11)..(11): n is 5-[N-(1-naphthylmethyl)carboxyamide]-2'-deoxyuridine
  misc_feature (13)..(13): n is 5-[N-(1-naphthylmethyl)carboxyamide]-2'-deoxyuridine
  misc_feature (17)..(17): n is 2'-O-methyl-cytidine
  misc_feature (19)..(19): n is 5-[N-(1-naphthylmethyl)carboxyamide]-2'-deoxyuridine
  misc_feature (21)..(21): n is 5-[N-(1-naphthylmethyl)carboxyamide]-2'-deoxyuridine
cnanagcangnangcanancn

SEQ ID NO: 530 - DNA, 21 bp, Artificial Sequence
  Synthetic
  misc_feature (2)..(2): n is 2'-O-methyl-guanosine
  misc_feature (4)..(4): n is 2'-O-methyl-cytidine
  misc_feature (9)..(9): n is 5-[N-(1-naphthylmethyl)carboxyamide]-2'-deoxyuridine
  misc_feature (11)..(11): n is 5-[N-(1-naphthylmethyl)carboxyamide]-2'-deoxyuridine
  misc_feature (13)..(13): n is 5-[N-(1-naphthylmethyl)carboxyamide]-2'-deoxyuridine
  misc_feature (17)..(17): n is 2'-O-methyl-cytidine
  misc_feature (19)..(19): n is 5-[N-(1-naphthylmethyl)carboxyamide]-2'-deoxyuridine
  misc_feature (21)..(21): n is 5-[N-(1-naphthylmethyl)carboxyamide]-2'-deoxyuridine
cnanagcangnangcanancn

SEQ ID NO: 531 - DNA, 21 bp, Artificial Sequence
  Synthetic
  misc_feature (2)..(2): n is 2'-O-methyl-guanosine
  misc_feature (9)..(9): n is 5-[N-(1-naphthylmethyl)carboxyamide]-2'-deoxyuridine
  misc_feature (11)..(11): n is 5-[N-(1-naphthylmethyl)carboxyamide]-2'-deoxyuridine
  misc_feature (12)..(12): n is 2'-O-methyl-adenosine
  misc_feature (13)..(13): n is 5-[N-(1-naphthylmethyl)carboxyamide]-2'-deoxyuridine
  misc_feature (15)..(15): 2'-O-methyl-cytidine
  misc_feature (19)..(19): n is 5-[N-(1-naphthylmethyl)carboxyamide]-2'-deoxyuridine
  misc_feature (21)..(21): n is 5-[N-(1-naphthylmethyl)carboxyamide]-2'-deoxyuridine
cnacagcangnnngnacancn

SEQ ID NO: 532 - DNA, 21 bp, Artificial Sequence
  Synthetic
  misc_feature (2)..(2): n is 2'-O-methyl-guanosine
  misc_feature (9)..(9): n is 5-[N-(1-naphthylmethyl)carboxyamide]-2'-deoxyuridine
  misc_feature (10)..(10): n is 2'-O-methyl-guanosine
  misc_feature (11)..(11): n is 5-[N-(1-naphthylmethyl)carboxyamide]-2'-deoxyuridine
  misc_feature (12)..(12): n is 2'-O-methyl-adenosine
  misc_feature (13)..(13): n is 5-[N-(1-naphthylmethyl)carboxyamide]-2'-deoxyuridine
  misc_feature (19)..(19): n is 5-[N-(1-naphthylmethyl)carboxyamide]-2'-deoxyuridine
  misc_feature (21)..(21): n is 5-[N-(1-naphthylmethyl)carboxyamide]-2'-deoxyuridine
cnacagcannnnngcacancn

SEQ ID NO: 533 - DNA, 21 bp, Artificial Sequence
  Synthetic
  misc_feature (2)..(2): n is 2'-O-methyl-guanosine
  misc_feature (9)..(9): n is 5-[N-(1-naphthylmethyl)carboxyamide]-2'-deoxyuridine
  misc_feature (10)..(10): n is 2'-O-methyl-guanosine
  misc_feature (11)..(11): n is 5-[N-(1-naphthylmethyl)carboxyamide]-2'-deoxyuridine
  misc_feature (13)..(13): n is 5-[N-(1-naphthylmethyl)carboxyamide]-2'-deoxyuridine
  misc_feature (15)..(15): n is 2'-O-methyl-cytidine
  misc_feature (19)..(19): n is 5-[N-(1-naphthylmethyl)carboxyamide]-2'-deoxyuridine
  misc_feature (21)..(21): n is 5-[N-(1-naphthylmethyl)carboxyamide]-2'-deoxyuridine
cnacagcannnangnacancn

SEQ ID NO: 534 - DNA, 21 bp, Artificial Sequence
  Synthetic
  misc_feature (1)..(1): n is 2'-O-methyl-cytidine
  misc_feature (9)..(9): n is 5-[N-(1-naphthylmethyl)carboxyamide]-2'-deoxyuridine
  misc_feature (11)..(11): n is 5-[N-(1-naphthylmethyl)carboxyamide]-2'-deoxyuridine
  misc_feature (13)..(13): n is 5-[N-(1-naphthylmethyl)carboxyamide]-2'-deoxyuridine
  misc_feature (19)..(19): n is 5-[N-(1-naphthylmethyl)carboxyamide]-2'-deoxyuridine
  misc_feature (20)..(20): n is 2'-O-methyl-cytidine
  misc_feature (21)..(21): n is 5-[N-(1-naphthylmethyl)carboxyamide]-2'- O-methyl-uridine
ngacagcangnangcacannn

SEQ ID NO: 535 - DNA, 21 bp, Artificial Sequence
  Synthetic
  misc_feature (5)..(5): n is 2'-O-methyl-adenosine
  misc_feature (9)..(9): n is 5-[N-(1-naphthylmethyl)carboxyamide]-2'-deoxyuridine
  misc_feature (11)..(11): n is 5-[N-(1-naphthylmethyl)carboxyamide]-2'-deoxyuridine
  misc_feature (13)..(13): n is 5-[N-(1-naphthylmethyl)carboxyamide]-2'-deoxyuridine
  misc_feature (19)..(19): n is 5-[N-(1-naphthylmethyl)carboxyamide]-2'-deoxyuridine
  misc_feature (20)..(20): n is 2'-O-methyl-cytidine
  misc_feature (21)..(21): n is 5-[N-(1-naphthylmethyl)carboxyamide]-2'- O-methyl-uridine
cgacngcangnangcacannn

SEQ ID NO: 536 - DNA, 21 bp, Artificial Sequence
  Synthetic
  misc_feature (1)..(1): n is 2'-O-methyl-cytidine
  misc_feature (5)..(5): n is 2'-O-methyl-adenosine
  misc_feature (9)..(9): n is 5-[N-(1-naphthylmethyl)carboxyamide]-2'-deoxyuridine
  misc_feature (11)..(11): n is 5-[N-(1-naphthylmethyl)carboxyamide]-2'-deoxyuridine
  misc_feature (13)..(13): n is 5-[N-(1-naphthylmethyl)carboxyamide]-2'-deoxyuridine
  misc_feature (19)..(19): n is 5-[N-(1-naphthylmethyl)carboxyamide]-2'-deoxyuridine
  misc_feature (20)..(20): n is 2'-O-methyl-cytidine
  misc_feature (21)..(21): n is 5-[N-(1-naphthylmethyl)carboxyamide]-2'-deoxyuridine
ngacngcangnangcacannn

SEQ ID NO: 537 - DNA, 21 bp, Artificial Sequence
  Synthetic
  misc_feature (9)..(9): n is 5-[N-(1-naphthylmethyl)carboxyamide]-2'-deoxyuridine
  misc_feature (11)..(11): n is 5-[N-(1-naphthylmethyl)carboxyamide]-2'-deoxyuridine
  misc_feature (13)..(13): n is 5-[N-(1-naphthylmethyl)carboxyamide]-2'-deoxyuridine
  misc_feature (19)..(19): n is 5-[N-(1-naphthylmethyl)carboxyamide]-2'- O-methyl-uridine
  misc_feature (20)..(20): n is 2'-O-methyl-cytidine
  misc_feature (21)..(21): n is 5-[N-(1-naphthylmethyl)carboxyamide]-2'- O-methyl-uridine
cgacagcangnangcacannn

SEQ ID NO: 538 - DNA, 21 bp, Artificial Sequence
  Synthetic
  misc_feature (9)..(9): n is 5-[N-(1-naphthylmethyl)carboxyamide]-2'-deoxyuridine
  misc_feature (11)..(11): n is 5-[N-(1-naphthylmethyl)carboxyamide]-2'-deoxyuridine
  misc_feature (13)..(13): n is 5-[N-(1-naphthylmethyl)carboxyamide]-2'-deoxyuridine
  misc_feature (16)..(16): n is 2'-O-methyl-adenosine
  misc_feature (17)..(17): n is 2'-O-methyl-cytidine
  misc_feature (18)..(18): n is 2'-O-methyl-adenosine
  misc_feature (19)..(19): n is 5-[N-(1-naphthylmethyl)carboxyamide]-2'-deoxyuridine
  misc_feature (21)..(21): n is 5-[N-(1-naphthylmethyl)carboxyamide]-2'-deoxyuridine
cgacagcangnangcnnnncn

SEQ ID NO: 539 - DNA, 21 bp, Artificial Sequence
  Synthetic
  misc_feature (9)..(9): n is 5-[N-(1-naphthylmethyl)carboxyamide]-2'-deoxyuridine
  misc_feature (11)..(11): n is 5-[N-(1-naphthylmethyl)carboxyamide]-2'-deoxyuridine
  misc_feature (13)..(13): n is 5-[N-(1-naphthylmethyl)carboxyamide]-2'- O-methyl-uridine
  misc_feature (14)..(14): n is 2'-O-methyl-guanosine
  misc_feature (15)..(15): n is 2'-O-methyl-cytidine
  misc_feature (19)..(19): n is 5-[N-(1-naphthylmethyl)carboxyamide]-2'-deoxyuridine
  misc_feature (21)..(21): n is 5-[N-(1-naphthylmethyl)carboxyamide]-2'-deoxyuridine
cgacagcangnannnacancn

SEQ ID NO: 540 - DNA, 21 bp, Artificial Sequence
  Synthetic
  misc_feature (9)..(9): n is 5-[N-(1-naphthylmethyl)carboxyamide]-2'-deoxyuridine
  misc_feature (10)..(10): n is 2'-O-methyl-guanosine
  misc_feature (11)..(11): n is 5-[N-(1-naphthylmethyl)carboxyamide]-2'-O-methyl-uridine
  misc_feature (12)..(12): n is 2'-O-methyl-adenosine
  misc_feature (13)..(13): n is 5-[N-(1-naphthylmethyl)carboxyamide]-2'-deoxyuridine
  misc_feature (19)..(19): n is 5-[N-(1-naphthylmethyl)carboxyamide]-2'-deoxyuridine
  misc_feature (21)..(21): n is 5-[N-(1-naphthylmethyl)carboxyamide]-2'-deoxyuridine
cgacagcannnnngcacancn

SEQ ID NO: 541 - DNA, 21 bp, Artificial Sequence
  Synthetic
  misc_feature (7)..(7): n is 2'-O-methyl-cytidine
  misc_feature (8)..(8): n is 2'-O-methyl-adenosine
  misc_feature (9)..(9): n is 5-[N-(1-naphthylmethyl)carboxyamide]-2'-O-methyl-uridine
  misc_feature (11)..(11): n is 5-[N-(1-naphthylmethyl)carboxyamide]-2'-deoxyuridine
  misc_feature (13)..(13): n is 5-[N-(1-naphthylmethyl)carboxyamide]-2'-deoxyuridine
  misc_feature (19)..(19): n is 5-[N-(1-naphthylmethyl)carboxyamide]-2'-deoxyuridine
  misc_feature (21)..(21): n is 5-[N-(1-naphthylmethyl)carboxyamide]-2'-deoxyuridine
cgacagnnngnangcacancn

SEQ ID NO: 542 - DNA, 21 bp, Artificial Sequence
  Synthetic
  misc_feature (4)..(4): n is 2'-O-methyl-cytidine
  misc_feature (5)..(5): n is 2'-O-methyl-adenosine
  misc_feature (6)..(6): n is 2'-O-methyl-guanosine
  misc_feature (9)..(9): n is 5-[N-(1-naphthylmethyl)carboxyamide]-2'-deoxyuridine
  misc_feature (11)..(11): n is 5-[N-(1-naphthylmethyl)carboxyamide]-2'-deoxyuridine
  misc_feature (13)..(13): n is 5-[N-(1-naphthylmethyl)carboxyamide]-2'-deoxyuridine
  misc_feature (19)..(19): n is 5-[N-(1-naphthylmethyl)carboxyamide]-2'-deoxyuridine
  misc_feature (21)..(21): n is 5-[N-(1-naphthylmethyl)carboxyamide]-2'-deoxyuridine
cgannncangnangcacancn

SEQ ID NO: 543 - DNA, 21 bp, Artificial Sequence
  Synthetic
  misc_feature (1)..(1): n is 2'-O-methyl-cytidine
  misc_feature (2)..(2): n is 2'-O-methyl-guanosine
  misc_feature (3)..(3): n is 2'-O-methyl-adenosine
  misc_feature (9)..(9): n is 5-[N-(1-naphthylmethyl)carboxyamide]-2'-deoxyuridine
  misc_feature (11)..(11): n is 5-[N-(1-naphthylmethyl)carboxyamide]-2'-deoxyuridine
  misc_feature (13)..(13): n is 5-[N-(1-naphthylmethyl)carboxyamide]-2'-deoxyuridine
  misc_feature (19)..(19): n is 5-[N-(1-naphthylmethyl)carboxyamide]-2'-deoxyuridine
  misc_feature (21)..(21): n is 5-[N-(1-naphthylmethyl)carboxyamide]-2'-deoxyuridine
nnncagcangnangcacancn

SEQ ID NO: 544 - DNA, 21 bp, Artificial Sequence
  Synthetic
  misc_feature (1)..(1): n is 2'-O-methyl-cytidine
  misc_feature (7)..(7): n is 2'-O-methyl-cytidine
  misc_feature (9)..(9): n is 5-[N-(1-naphthylmethyl)carboxyamide]-2'-deoxyuridine
  misc_feature (11)..(11): n is 5-[N-(1-naphthylmethyl)carboxyamide]-2'-deoxyuridine
  misc_feature (13)..(13): n is 5-[N-(1-naphthylmethyl)carboxyamide]-2'-deoxyuridine
  misc_feature (14)..(14): n is 2'-O-methyl-guanosine
  misc_feature (16)..(16): n is 2'-O-methyl-adenosine
  misc_feature (18)..(18): n is 2'-O-methyl-adenosine
  misc_feature (19)..(19): n is 5-[N-(1-naphthylmethyl)carboxyamide]-2'-deoxyuridine
  misc_feature (21)..(21): n is 5-[N-(1-naphthylmethyl)carboxyamide]-2'-O-methyl-uridine
ngacagnangnanncncnncn

SEQ ID NO: 545 - DNA, 21 bp, Artificial Sequence
  Synthetic
  misc_feature (1)..(1): n is 2'-O-methyl-cytidine
  misc_feature (4)..(4): n is 2'-O-methyl-cytidine
  misc_feature (6)..(6): n is 2'-O-methyl-guanosine
  misc_feature (7)..(7): n is 2'-O-methyl-cytidine
  misc_feature (9)..(9): n is 5-[N-(1-naphthylmethyl)carboxyamide]-2'-deoxyuridine
  misc_feature (11)..(11): n is 5-[N-(1-naphthylmethyl)carboxyamide]-2'-deoxyuridine
  misc_feature (13)..(13): n is 5-[N-(1-naphthylmethyl)carboxyamide]-2'-deoxyuridine
  misc_feature (14)..(14): n is 2'-O-methyl-guanosine
  misc_feature (15)..(15): n is 2'-O-methyl-cytidine
  misc_feature (16)..(16): n is 2'-O-methyl-adenosine
  misc_feature (17)..(17): n is 2'-O-methyl-cytidine
  misc_feature (18)..(18): n is 2'-O-methyl-adenosine
  misc_feature (19)..(19): n is 5-[N-(1-naphthylmethyl)carboxyamide]-2'-deoxyuridine
  misc_feature (20)..(20): n is 2'-O-methyl-cytidine
  misc_feature (21)..(21): n is 5-[N-(1-naphthylmethyl)carboxyamide]-2'-O-methyl-uridine
nganannangnannnnnnnnn

SEQ ID NO: 546 - DNA, 38 bp, Artificial Sequence
  Synthetic
  misc_feature (5)..(5): n is 5-[N-(1-naphthylmethyl)carboxyamide]-2'-deoxyuridine
  misc_feature (12)..(13): n is 5-[N-(1-naphthylmethyl)carboxyamide]-2'-deoxyuridine
  misc_feature (18)..(18): n is 5-[N-(1-naphthylmethyl)carboxyamide]-2'-deoxyuridine
  misc_feature (21)..(22): n is 5-[N-(1-naphthylmethyl)carboxyamide]-2'-deoxyuridine
  misc_feature (24)..(24): n is 5-[N-(1-naphthylmethyl)carboxyamide]-2'-deoxyuridine
  misc_feature (29)..(31): n is 5-[N-(1-naphthylmethyl)carboxyamide]-2'-deoxyuridine
  misc_feature (35)..(35): n is 5-[N-(1-naphthylmethyl)carboxyamide]-2'-deoxyuridine
tcaancagccgnncaagngcnngnaggannnaaangga

SEQ ID NO: 547 - DNA, 37 bp, Artificial Sequence
  Synthetic
  misc_feature (5)..(5): n is 5-[N-(1-naphthylmethyl)carboxyamide]-2'-deoxyuridine
  misc_feature (12)..(13): n is 5-[N-(1-naphthylmethyl)carboxyamide]-2'-deoxyuridine
  misc_feature (18)..(18): n is 5-[N-(1-naphthylmethyl)carboxyamide]-2'-deoxyuridine
  misc_feature (21)..(22): n is 5-[N-(1-naphthylmethyl)carboxyamide]-2'-deoxyuridine
  misc_feature (24)..(24): n is 5-[N-(1-naphthylmethyl)carboxyamide]-2'-deoxyuridine
  misc_feature (29)..(31): n is 5-[N-(1-naphthylmethyl)carboxyamide]-2'-deoxyuridine
  misc_feature (35)..(35): n is 5-[N-(1-naphthylmethyl)carboxyamide]-2'-deoxyuridine
tcaancagccgnncaagngcnngnaggannnaaangg

SEQ ID NO: 548 - DNA, 36 bp, Artificial Sequence
  Synthetic
  misc_feature (5)..(5): n is 5-[N-(1-naphthylmethyl)carboxyamide]-2'-deoxyuridine
  misc_feature (12)..(13): n is 5-[N-(1-naphthylmethyl)carboxyamide]-2'-deoxyuridine
  misc_feature (18)..(18): n is 5-[N-(1-naphthylmethyl)carboxyamide]-2'-deoxyuridine
  misc_feature (21)..(22): n is 5-[N-(1-naphthylmethyl)carboxyamide]-2'-deoxyuridine
  misc_feature (24)..(24): n is 5-[N-(1-naphthylmethyl)carboxyamide]-2'-deoxyuridine
  misc_feature (29)..(31): n is 5-[N-(1-naphthylmethyl)carboxyamide]-2'-deoxyuridine
  misc_feature (35)..(35): n is 5-[N-(1-naphthylmethyl)carboxyamide]-2'-deoxyuridine
tcaancagccgnncaagngcnngnaggannnaaang

SEQ ID NO: 549 - DNA, 35 bp, Artificial Sequence
  Synthetic
  misc_feature (5)..(5): n is 5-[N-(1-naphthylmethyl)carboxyamide]-2'-deoxyuridine
  misc_feature (12)..(13): n is 5-[N-(1-naphthylmethyl)carboxyamide]-2'-deoxyuridine
  misc_feature (18)..(18): n is 5-[N-(1-naphthylmethyl)carboxyamide]-2'-deoxyuridine
  misc_feature (21)..(22): n is 5-[N-(1-naphthylmethyl)carboxyamide]-2'-deoxyuridine
  misc_feature (24)..(24): n is 5-[N-(1-naphthylmethyl)carboxyamide]-2'-deoxyuridine
  misc_feature (29)..(31): n is 5-[N-(1-naphthylmethyl)carboxyamide]-2'-deoxyuridine
  misc_feature (35)..(35): n is 5-[N-(1-naphthylmethyl)carboxyamide]-2'-deoxyuridine
tcaancagccgnncaagngcnngnaggannnaaan

SEQ ID NO: 550 - DNA, 39 bp, Artificial Sequence
  Synthetic
  misc_feature (4)..(4): n is 5-[N-(1-naphthylmethyl)carboxyamide]-2'-deoxyuridine
  misc_feature (11)..(12): n is 5-[N-(1-naphthylmethyl)carboxyamide]-2'-deoxyuridine
  misc_feature (17)..(17): n is 5-[N-(1-naphthylmethyl)carboxyamide]-2'-deoxyuridine
  misc_feature (20)..(21): n is 5-[N-(1-naphthylmethyl)carboxyamide]-2'-deoxyuridine
  misc_feature (23)..(23): n is 5-[N-(1-naphthylmethyl)carboxyamide]-2'-deoxyuridine
  misc_feature (28)..(30): n is 5-[N-(1-naphthylmethyl)carboxyamide]-2'-deoxyuridine
  misc_feature (34)..(34): n is 5-[N-(1-naphthylmethyl)carboxyamide]-2'-deoxyuridine
  misc_feature (39)..(39): n is 5-[N-(1-naphthylmethyl)carboxyamide]-2'-deoxyuridine
caancagccgnncaagngcnngnaggannnaaanggaan

SEQ ID NO: 551 - DNA, 38 bp, Artificial Sequence
  Synthetic
  misc_feature (3)..(3): n is 5-[N-(1-naphthylmethyl)carboxyamide]-2'-deoxyuridine
  misc_feature (10)..(11): n is 5-[N-(1-naphthylmethyl)carboxyamide]-2'-deoxyuridine
  misc_feature (16)..(16): n is 5-[N-(1-naphthylmethyl)carboxyamide]-2'-deoxyuridine
  misc_feature (19)..(20): n is 5-[N-(1-naphthylmethyl)carboxyamide]-2'-deoxyuridine
  misc_feature (22)..(22): n is 5-[N-(1-naphthylmethyl)carboxyamide]-2'-deoxyuridine
  misc_feature (27)..(29): n is 5-[N-(1-naphthylmethyl)carboxyamide]-2'-deoxyuridine
  misc_feature (33)..(33): n is 5-[N-(1-naphthylmethyl)carboxyamide]-2'-deoxyuridine
  misc_feature (38)..(38): n is 5-[N-(1-naphthylmethyl)carboxyamide]-2'-deoxyuridine
aancagccgnncaagngcnngnaggannnaaanggaan

SEQ ID NO: 552 - DNA, 37 bp, Artificial Sequence
  Synthetic
  misc_feature (2)..(2): n is 5-[N-(1-naphthylmethyl)carboxyamide]-2'-deoxyuridine
  misc_feature (9)..(10): n is 5-[N-(1-naphthylmethyl)carboxyamide]-2'-deoxyuridine
  misc_feature (15)..(15): n is 5-[N-(1-naphthylmethyl)carboxyamide]-2'-deoxyuridine
  misc_feature (18)..(19): n is 5-[N-(1-naphthylmethyl)carboxyamide]-2'-deoxyuridine
  misc_feature (21)..(21): n is 5-[N-(1-naphthylmethyl)carboxyamide]-2'-deoxyuridine
  misc_feature (26)..(28): n is 5-[N-(1-naphthylmethyl)carboxyamide]-2'-deoxyuridine
  misc_feature (32)..(32): n is 5-[N-(1-naphthylmethyl)carboxyamide]-2'-deoxyuridine
  misc_feature (37)..(37): n is 5-[N-(1-naphthylmethyl)carboxyamide]-2'-deoxyuridine
ancagccgnncaagngcnngnaggannnaaanggaan

SEQ ID NO: 553 - DNA, 36 bp, Artificial Sequence
  Synthetic
  misc_feature (1)..(1): n is 5-[N-(1-naphthylmethyl)carboxyamide]-2'-deoxyuridine
  misc_feature (8)..(9): n is 5-[N-(1-naphthylmethyl)carboxyamide]-2'-deoxyuridine
  misc_feature (14)..(14): n is 5-[N-(1-naphthylmethyl)carboxyamide]-2'-deoxyuridine
  misc_feature (17)..(18): n is 5-[N-(1-naphthylmethyl)carboxyamide]-2'-deoxyuridine
  misc_feature (20)..(20): n is 5-[N-(1-naphthylmethyl)carboxyamide]-2'-deoxyuridine
  misc_feature (25)..(27): n is 5-[N-(1-naphthylmethyl)carboxyamide]-2'-deoxyuridine
  misc_feature (31)..(31): n is 5-[N-(1-naphthylmethyl)carboxyamide]-2'-deoxyuridine
  misc_feature (36)..(36): n is 5-[N-(1-naphthylmethyl)carboxyamide]-2'-deoxyuridine
ncagccgnncaagngcnngnaggannnaaanggaan

SEQ ID NO: 554 - DNA, 35 bp, Artificial Sequence
  Synthetic
  misc_feature (7)..(8): n is 5-[N-(1-naphthylmethyl)carboxyamide]-2'-deoxyuridine
  misc_feature (13)..(13): n is 5-[N-(1-naphthylmethyl)carboxyamide]-2'-deoxyuridine
  misc_feature (16)..(17): n is 5-[N-(1-naphthylmethyl)carboxyamide]-2'-deoxyuridine
  misc_feature (19)..(19): n is 5-[N-(1-naphthylmethyl)carboxyamide]-2'-deoxyuridine
  misc_feature (24)..(26): n is 5-[N-(1-naphthylmethyl)carboxyamide]-2'-deoxyuridine
  misc_feature (30)..(30): n is 5-[N-(1-naphthylmethyl)carboxyamide]-2'-deoxyuridine
  misc_feature (35)..(35): n is 5-[N-(1-naphthylmethyl)carboxyamide]-2'-deoxyuridine
cagccgnncaagngcnngnaggannnaaanggaan

SEQ ID NO: 555 - DNA, 34 bp, Artificial Sequence
  Synthetic
  misc_feature (6)..(7): n is 5-[N-(1-naphthylmethyl)carboxyamide]-2'-deoxyuridine
  misc_feature (12)..(12): n is 5-[N-(1-naphthylmethyl)carboxyamide]-2'-deoxyuridine
  misc_feature (15)..(16): n is 5-[N-(1-naphthylmethyl)carboxyamide]-2'-deoxyuridine
  misc_feature (18)..(18): n is 5-[N-(1-naphthylmethyl)carboxyamide]-2'-deoxyuridine
  misc_feature (23)..(25): n is 5-[N-(1-naphthylmethyl)carboxyamide]-2'-deoxyuridine
  misc_feature (29)..(29): n is 5-[N-(1-naphthylmethyl)carboxyamide]-2'-deoxyuridine
  misc_feature (34)..(34): n is 5-[N-(1-naphthylmethyl)carboxyamide]-2'-deoxyuridine
agccgnncaagngcnngnaggannnaaanggaan

SEQ ID NO: 556 - DNA, 38 bp, Artificial Sequence
  Synthetic
  misc_feature (4)..(4): n is 5-[N-(1-naphthylmethyl)carboxyamide]-2'-deoxyuridine
  misc_feature (11)..(12): n is 5-[N-(1-naphthylmethyl)carboxyamide]-2'-deoxyuridine
  misc_feature (17)..(17): n is 5-[N-(1-naphthylmethyl)carboxyamide]-2'-deoxyuridine
  misc_feature (20)..(21): n is 5-[N-(1-naphthylmethyl)carboxyamide]-2'-deoxyuridine
  misc_feature (23)..(23): n is 5-[N-(1-naphthylmethyl)carboxyamide]-2'-deoxyuridine
  misc_feature (28)..(30): n is 5-[N-(1-naphthylmethyl)carboxyamide]-2'-deoxyuridine
  misc_feature (34)..(34): n is 5-[N-(1-naphthylmethyl)carboxyamide]-2'-deoxyuridine
caancagccgnncaagngcnngnaggannnaaanggaa

SEQ ID NO: 557 - DNA, 37 bp, Artificial Sequence
  Synthetic
  misc_feature (3)..(3): n is 5-[N-(1-naphthylmethyl)carboxyamide]-2'-deoxyuridine
  misc_feature (10)..(11): n is 5-[N-(1-naphthylmethyl)carboxyamide]-2'-deoxyuridine
  misc_feature (16)..(16): n is 5-[N-(1-naphthylmethyl)carboxyamide]-2'-deoxyuridine
  misc_feature (19)..(20): n is 5-[N-(1-naphthylmethyl)carboxyamide]-2'-deoxyuridine
  misc_feature (22)..(22): n is 5-[N-(1-naphthylmethyl)carboxyamide]-2'-deoxyuridine
  misc_feature (27)..(29): n is 5-[N-(1-naphthylmethyl)carboxyamide]-2'-deoxyuridine
  misc_feature (33)..(33): n is 5-[N-(1-naphthylmethyl)carboxyamide]-2'-deoxyuridine
aancagccgnncaagngcnngnaggannnaaanggaa

SEQ ID NO: 558 - DNA, 36 bp, Artificial Sequence
  Synthetic
  misc_feature (2)..(2): n is 5-[N-(1-naphthylmethyl)carboxyamide]-2'-deoxyuridine
  misc_feature (9)..(10): n is 5-[N-(1-naphthylmethyl)carboxyamide]-2'-deoxyuridine
  misc_feature (15)..(15): n is 5-[N-(1-naphthylmethyl)carboxyamide]-2'-deoxyuridine
  misc_feature (18)..(19): n is 5-[N-(1-naphthylmethyl)carboxyamide]-2'-deoxyuridine
  misc_feature (21)..(21): n is 5-[N-(1-naphthylmethyl)carboxyamide]-2'-deoxyuridine
  misc_feature (26)..(28): n is 5-[N-(1-naphthylmethyl)carboxyamide]-2'-deoxyuridine
  misc_feature (32)..(32): n is 5-[N-(1-naphthylmethyl)carboxyamide]-2'-deoxyuridine
ancagccgnncaagngcnngnaggannnaaanggaa

SEQ ID NO: 559 - DNA, 35 bp, Artificial Sequence
  Synthetic
  misc_feature (1)..(1): n is 5-[N-(1-naphthylmethyl)carboxyamide]-2'-deoxyuridine
  misc_feature (8)..(9): n is 5-[N-(1-naphthylmethyl)carboxyamide]-2'-deoxyuridine
  misc_feature (14)..(14): n is 5-[N-(1-naphthylmethyl)carboxyamide]-2'-deoxyuridine
  misc_feature (17)..(18): n is 5-[N-(1-naphthylmethyl)carboxyamide]-2'-deoxyuridine
  misc_feature (20)..(20): n is 5-[N-(1-naphthylmethyl)carboxyamide]-2'-deoxyuridine
  misc_feature (25)..(27): n is 5-[N-(1-naphthylmethyl)carboxyamide]-2'-deoxyuridine
  misc_feature (31)..(31): n is 5-[N-(1-naphthylmethyl)carboxyamide]-2'-deoxyuridine
ncagccgnncaagngcnngnaggannnaaanggaa

SEQ ID NO: 560 - DNA, 34 bp, Artificial Sequence
  Synthetic
  misc_feature (7)..(8): n is 5-[N-(1-naphthylmethyl)carboxyamide]-2'-deoxyuridine
  misc_feature (13)..(13): n is 5-[N-(1-naphthylmethyl)carboxyamide]-2'-deoxyuridine
  misc_feature (16)..(17): n is 5-[N-(1-naphthylmethyl)carboxyamide]-2'-deoxyuridine
  misc_feature (19)..(19): n is 5-[N-(1-naphthylmethyl)carboxyamide]-2'-deoxyuridine
  misc_feature (24)..(26): n is 5-[N-(1-naphthylmethyl)carboxyamide]-2'-deoxyuridine
  misc_feature (30)..(30): n is 5-[N-(1-naphthylmethyl)carboxyamide]-2'-deoxyuridine
cagccgnncaagngcnngnaggannnaaanggaa

SEQ ID NO: 561 - DNA, 33 bp, Artificial Sequence
  Synthetic
  misc_feature (6)..(7): n is 5-[N-(1-naphthylmethyl)carboxyamide]-2'-deoxyuridine
  misc_feature (12)..(12): n is 5-[N-(1-naphthylmethyl)carboxyamide]-2'-deoxyuridine
  misc_feature (15)..(16): n is 5-[N-(1-naphthylmethyl)carboxyamide]-2'-deoxyuridine
  misc_feature (18)..(18): n is 5-[N-(1-naphthylmethyl)carboxyamide]-2'-deoxyuridine
  misc_feature (23)..(25): n is 5-[N-(1-naphthylmethyl)carboxyamide]-2'-deoxyuridine
  misc_feature (29)..(29): n is 5-[N-(1-naphthylmethyl)carboxyamide]-2'-deoxyuridine
agccgnncaagngcnngnaggannnaaanggaa

SEQ ID NO: 562 - DNA, 37 bp, Artificial Sequence
  Synthetic
  misc_feature (4)..(4): n is 5-[N-(1-naphthylmethyl)carboxyamide]-2'-deoxyuridine
  misc_feature (11)..(12): n is 5-[N-(1-naphthylmethyl)carboxyamide]-2'-deoxyuridine
  misc_feature (17)..(17): n is 5-[N-(1-naphthylmethyl)carboxyamide]-2'-deoxyuridine
  misc_feature (20)..(21): n is 5-[N-(1-naphthylmethyl)carboxyamide]-2'-deoxyuridine
  misc_feature (23)..(23): n is 5-[N-(1-naphthylmethyl)carboxyamide]-2'-deoxyuridine
  misc_feature (28)..(30): n is 5-[N-(1-naphthylmethyl)carboxyamide]-2'-deoxyuridine
  misc_feature (34)..(34): n is 5-[N-(1-naphthylmethyl)carboxyamide]-2'-deoxyuridine
caancagccgnncaagngcnngnaggannnaaangga

SEQ ID NO: 563 - DNA, 36 bp, Artificial Sequence
  Synthetic
  misc_feature (3)..(3): n is 5-[N-(1-naphthylmethyl)carboxyamide]-2'-deoxyuridine
  misc_feature (10)..(11): n is 5-[N-(1-naphthylmethyl)carboxyamide]-2'-deoxyuridine
  misc_feature (16)..(16): n is 5-[N-(1-naphthylmethyl)carboxyamide]-2'-deoxyuridine
  misc_feature (19)..(20): n is 5-[N-(1-naphthylmethyl)carboxyamide]-2'-deoxyuridine
  misc_feature (22)..(22): n is 5-[N-(1-naphthylmethyl)carboxyamide]-2'-deoxyuridine
  misc_feature (27)..(29): n is 5-[N-(1-naphthylmethyl)carboxyamide]-2'-deoxyuridine
  misc_feature (33)..(33): n is 5-[N-(1-naphthylmethyl)carboxyamide]-2'-deoxyuridine
aancagccgnncaagngcnngnaggannnaaangga

SEQ ID NO: 564 - DNA, 35 bp, Artificial Sequence
  Synthetic
  misc_feature (2)..(2): n is 5-[N-(1-naphthylmethyl)carboxyamide]-2'-deoxyuridine
  misc_feature (9)..(10): n is 5-[N-(1-naphthylmethyl)carboxyamide]-2'-deoxyuridine
  misc_feature (15)..(15): n is 5-[N-(1-naphthylmethyl)carboxyamide]-2'-deoxyuridine
  misc_feature (18)..(19): n is 5-[N-(1-naphthylmethyl)carboxyamide]-2'-deoxyuridine
  misc_feature (21)..(21): n is 5-[N-(1-naphthylmethyl)carboxyamide]-2'-deoxyuridine
  misc_feature (26)..(28): n is 5-[N-(1-naphthylmethyl)carboxyamide]-2'-deoxyuridine
  misc_feature (32)..(32): n is 5-[N-(1-naphthylmethyl)carboxyamide]-2'-deoxyuridine
ancagccgnncaagngcnngnaggannnaaangga

SEQ ID NO: 565 - DNA, 34 bp, Artificial Sequence
  Synthetic
  misc_feature (1)..(1): n is 5-[N-(1-naphthylmethyl)carboxyamide]-2'-deoxyuridine
  misc_feature (8)..(9): n is 5-[N-(1-naphthylmethyl)carboxyamide]-2'-deoxyuridine
  misc_feature (14)..(14): n is 5-[N-(1-naphthylmethyl)carboxyamide]-2'-deoxyuridine
  misc_feature (17)..(18): n is 5-[N-(1-naphthylmethyl)carboxyamide]-2'-deoxyuridine
  misc_feature (20)..(20): n is 5-[N-(1-naphthylmethyl)carboxyamide]-2'-deoxyuridine
  misc_feature (25)..(27): n is 5-[N-(1-naphthylmethyl)carboxyamide]-2'-deoxyuridine
  misc_feature (31)..(31): n is 5-[N-(1-naphthylmethyl)carboxyamide]-2'-deoxyuridine
ncagccgnncaagngcnngnaggannnaaangga

SEQ ID NO: 566 - DNA, 33 bp, Artificial Sequence
  Synthetic
  misc_feature (7)..(8): n is 5-[N-(1-naphthylmethyl)carboxyamide]-2'-deoxyuridine
  misc_feature (13)..(13): n is 5-[N-(1-naphthylmethyl)carboxyamide]-2'-deoxyuridine
  misc_feature (16)..(17): n is 5-[N-(1-naphthylmethyl)carboxyamide]-2'-deoxyuridine
  misc_feature (19)..(19): n is 5-[N-(1-naphthylmethyl)carboxyamide]-2'-deoxyuridine
  misc_feature (24)..(26): n is 5-[N-(1-naphthylmethyl)carboxyamide]-2'-deoxyuridine
  misc_feature (30)..(30): n is 5-[N-(1-naphthylmethyl)carboxyamide]-2'-deoxyuridine
cagccgnncaagngcnngnaggannnaaangga

SEQ ID NO: 567 - DNA, 32 bp, Artificial Sequence
  Synthetic
  misc_feature (6)..(7): n is 5-[N-(1-naphthylmethyl)carboxyamide]-2'-deoxyuridine
  misc_feature (12)..(12): n is 5-[N-(1-naphthylmethyl)carboxyamide]-2'-deoxyuridine
  misc_feature (15)..(16): n is 5-[N-(1-naphthylmethyl)carboxyamide]-2'-deoxyuridine
  misc_feature (18)..(18): n is 5-[N-(1-naphthylmethyl)carboxyamide]-2'-deoxyuridine
  misc_feature (23)..(25): n is 5-[N-(1-naphthylmethyl)carboxyamide]-2'-deoxyuridine
  misc_feature (29)..(29): n is 5-[N-(1-naphthylmethyl)carboxyamide]-2'-deoxyuridine
agccgnncaagngcnngnaggannnaaangga

SEQ ID NO: 568 - DNA, 32 bp, Artificial Sequence
  Synthetic
  misc_feature (7)..(8): n is 5-[N-(1-naphthylmethyl)carboxyamide]-2'-deoxyuridine
  misc_feature (13)..(13): n is 5-[N-(1-naphthylmethyl)carboxyamide]-2'-deoxyuridine
  misc_feature (16)..(17): n is 5-[N-(1-naphthylmethyl)carboxyamide]-2'-deoxyuridine
  misc_feature (19)..(19): n is 5-[N-(1-naphthylmethyl)carboxyamide]-2'-deoxyuridine
  misc_feature (24)..(26): n is 5-[N-(1-naphthylmethyl)carboxyamide]-2'-deoxyuridine
  misc_feature (30)..(30): n is 5-[N-(1-naphthylmethyl)carboxyamide]-2'-deoxyuridine
cagccgnncaagngcnngnaggannnaaangg

SEQ ID NO: 569 - DNA, 31 bp, Artificial Sequence
  Synthetic
  misc_feature (7)..(8): n is 5-[N-(1-naphthylmethyl)carboxyamide]-2'-deoxyuridine
  misc_feature (13)..(13): n is 5-[N-(1-naphthylmethyl)carboxyamide]-2'-deoxyuridine
  misc_feature (16)..(17): n is 5-[N-(1-naphthylmethyl)carboxyamide]-2'-deoxyuridine
  misc_feature (19)..(19): n is 5-[N-(1-naphthylmethyl)carboxyamide]-2'-deoxyuridine
  misc_feature (24)..(26): n is 5-[N-(1-naphthylmethyl)carboxyamide]-2'-deoxyuridine
  misc_feature (30)..(30): n is 5-[N-(1-naphthylmethyl)carboxyamide]-2'-deoxyuridine
cagccgnncaagngcnngnaggannnaaang

SEQ ID NO: 570 - DNA, 30 bp, Artificial Sequence
  Synthetic
  misc_feature (7)..(8): n is 5-[N-(1-naphthylmethyl)carboxyamide]-2'-deoxyuridine
  misc_feature (13)..(13): n is 5-[N-(1-naphthylmethyl)carboxyamide]-2'-deoxyuridine
  misc_feature (16)..(17): n is 5-[N-(1-naphthylmethyl)carboxyamide]-2'-deoxyuridine
  misc_feature (19)..(19): n is 5-[N-(1-naphthylmethyl)carboxyamide]-2'-deoxyuridine
  misc_feature (24)..(26): n is 5-[N-(1-naphthylmethyl)carboxyamide]-2'-deoxyuridine
  misc_feature (30)..(30): n is 5-[N-(1-naphthylmethyl)carboxyamide]-2'-deoxyuridine
cagccgnncaagngcnngnaggannnaaan

SEQ ID NO: 571 - DNA, 29 bp, Artificial Sequence
  Synthetic
  misc_feature (7)..(8): n is 5-[N-(1-naphthylmethyl)carboxyamide]-2'-deoxyuridine
  misc_feature (13)..(13): n is 5-[N-(1-naphthylmethyl)carboxyamide]-2'-deoxyuridine
  misc_feature (16)..(17): n is 5-[N-(1-naphthylmethyl)carboxyamide]-2'-deoxyuridine
  misc_feature (19)..(19): n is 5-[N-(1-naphthylmethyl)carboxyamide]-2'-deoxyuridine
  misc_feature (24)..(26): n is 5-[N-(1-naphthylmethyl)carboxyamide]-2'-deoxyuridine
cagccgnncaagngcnngnaggannnaaa

SEQ ID NO: 572 - DNA, 28 bp, Artificial Sequence
  Synthetic
  misc_feature (7)..(8): n is 5-[N-(1-naphthylmethyl)carboxyamide]-2'-deoxyuridine
  misc_feature (13)..(13): n is 5-[N-(1-naphthylmethyl)carboxyamide]-2'-deoxyuridine
  misc_feature (16)..(17): n is 5-[N-(1-naphthylmethyl)carboxyamide]-2'-deoxyuridine
  misc_feature (19)..(19): n is 5-[N-(1-naphthylmethyl)carboxyamide]-2'-deoxyuridine
  misc_feature (24)..(26): n is 5-[N-(1-naphthylmethyl)carboxyamide]-2'-deoxyuridine
cagccgnncaagngcnngnaggannnaa

SEQ ID NO: 573 - DNA, 27 bp, Artificial Sequence
  Synthetic
  misc_feature (7)..(8): n is 5-[N-(1-naphthylmethyl)carboxyamide]-2'-deoxyuridine
  misc_feature (13)..(13): n is 5-[N-(1-naphthylmethyl)carboxyamide]-2'-deoxyuridine
  misc_feature (16)..(17): n is 5-[N-(1-naphthylmethyl)carboxyamide]-2'-deoxyuridine
  misc_feature (19)..(19): n is 5-[N-(1-naphthylmethyl)carboxyamide]-2'-deoxyuridine
  misc_feature (24)..(26): n is 5-[N-(1-naphthylmethyl)carboxyamide]-2'-deoxyuridine
cagccgnncaagngcnngnaggannna

SEQ ID NO: 574 - DNA, 26 bp, Artificial Sequence
  Synthetic
  misc_feature (7)..(8): n is 5-[N-(1-naphthylmethyl)carboxyamide]-2'-deoxyuridine
  misc_feature (13)..(13): n is 5-[N-(1-naphthylmethyl)carboxyamide]-2'-deoxyuridine
  misc_feature (16)..(17): n is 5-[N-(1-naphthylmethyl)carboxyamide]-2'-deoxyuridine
  misc_feature (19)..(19): n is 5-[N-(1-naphthylmethyl)carboxyamide]-2'-deoxyuridine
  misc_feature (24)..(26): n is 5-[N-(1-naphthylmethyl)carboxyamide]-2'-deoxyuridine
cagccgnncaagngcnngnaggannn

SEQ ID NO: 575 - DNA, 31 bp, Artificial Sequence
  Synthetic
  misc_feature (6)..(7): n is 5-[N-(1-naphthylmethyl)carboxyamide]-2'-deoxyuridine
  misc_feature (12)..(12): n is 5-[N-(1-naphthylmethyl)carboxyamide]-2'-deoxyuridine
  misc_feature (15)..(16): n is 5-[N-(1-naphthylmethyl)carboxyamide]-2'-deoxyuridine
  misc_feature (18)..(18): n is 5-[N-(1-naphthylmethyl)carboxyamide]-2'-deoxyuridine
  misc_feature (23)..(25): n is 5-[N-(1-naphthylmethyl)carboxyamide]-2'-deoxyuridine
  misc_feature (29)..(29): n is 5-[N-(1-naphthylmethyl)carboxyamide]-2'-deoxyuridine
agccgnncaagngcnngnaggannnaaangg

SEQ ID NO: 576 - DNA, 30 bp, Artificial Sequence
  Synthetic
  misc_feature (6)..(7): n is 5-[N-(1-naphthylmethyl)carboxyamide]-2'-deoxyuridine
  misc_feature (12)..(12): n is 5-[N-(1-naphthylmethyl)carboxyamide]-2'-deoxyuridine
  misc_feature (15)..(16): n is 5-[N-(1-naphthylmethyl)carboxyamide]-2'-deoxyuridine
  misc_feature (18)..(18): n is 5-[N-(1-naphthylmethyl)carboxyamide]-2'-deoxyuridine
  misc_feature (23)..(25): n is 5-[N-(1-naphthylmethyl)carboxyamide]-2'-deoxyuridine
  misc_feature (29)..(29): n is 5-[N-(1-naphthylmethyl)carboxyamide]-2'-deoxyuridine
agccgnncaagngcnngnaggannnaaang

SEQ ID NO: 577 - DNA, 29 bp, Artificial Sequence
  Synthetic
  misc_feature (6)..(7): n is 5-[N-(1-naphthylmethyl)carboxyamide]-2'-deoxyuridine
  misc_feature (12)..(12): n is 5-[N-(1-naphthylmethyl)carboxyamide]-2'-deoxyuridine
  misc_feature (15)..(16): n is 5-[N-(1-naphthylmethyl)carboxyamide]-2'-deoxyuridine
  misc_feature (18)..(18): n is 5-[N-(1-naphthylmethyl)carboxyamide]-2'-deoxyuridine
  misc_feature (23)..(25): n is 5-[N-(1-naphthylmethyl)carboxyamide]-2'-deoxyuridine
  misc_feature (29)..(29): n is 5-[N-(1-naphthylmethyl)carboxyamide]-2'-deoxyuridine
agccgnncaagngcnngnaggannnaaan

SEQ ID NO: 578 - DNA, 28 bp, Artificial Sequence
  Synthetic
  misc_feature (6)..(7): n is 5-[N-(1-naphthylmethyl)carboxyamide]-2'-deoxyuridine
  misc_feature (12)..(12): n is 5-[N-(1-naphthylmethyl)carboxyamide]-2'-deoxyuridine
  misc_feature (15)..(16): n is 5-[N-(1-naphthylmethyl)carboxyamide]-2'-deoxyuridine
  misc_feature (18)..(18): n is 5-[N-(1-naphthylmethyl)carboxyamide]-2'-deoxyuridine
  misc_feature (23)..(25): n is 5-[N-(1-naphthylmethyl)carboxyamide]-2'-deoxyuridine
agccgnncaagngcnngnaggannnaaa

SEQ ID NO: 579 - DNA, 27 bp, Artificial Sequence
  Synthetic
  misc_feature (6)..(7): n is 5-[N-(1-naphthylmethyl)carboxyamide]-2'-deoxyuridine
  misc_feature (12)..(12): n is 5-[N-(1-naphthylmethyl)carboxyamide]-2'-deoxyuridine
  misc_feature (15)..(16): n is 5-[N-(1-naphthylmethyl)carboxyamide]-2'-deoxyuridine
  misc_feature (18)..(18): n is 5-[N-(1-naphthylmethyl)carboxyamide]-2'-deoxyuridine
  misc_feature (23)..(25): n is 5-[N-(1-naphthylmethyl)carboxyamide]-2'-deoxyuridine
agccgnncaagngcnngnaggannnaa

SEQ ID NO: 580 - DNA, 26 bp, Artificial Sequence
  Synthetic
  misc_feature (6)..(7): n is 5-[N-(1-naphthylmethyl)carboxyamide]-2'-deoxyuridine
  misc_feature (12)..(12): n is 5-[N-(1-naphthylmethyl)carboxyamide]-2'-deoxyuridine
  misc_feature (15)..(16): n is 5-[N-(1-naphthylmethyl)carboxyamide]-2'-deoxyuridine
  misc_feature (18)..(18): n is 5-[N-(1-naphthylmethyl)carboxyamide]-2'-deoxyuridine
  misc_feature (23)..(25): n is 5-[N-(1-naphthylmethyl)carboxyamide]-2'-deoxyuridine
agccgnncaagngcnngnaggannna

SEQ ID NO: 581 - DNA, 25 bp, Artificial Sequence
  Synthetic
  misc_feature (6)..(7): n is 5-[N-(1-naphthylmethyl)carboxyamide]-2'-deoxyuridine
  misc_feature (12)..(12): n is 5-[N-(1-naphthylmethyl)carboxyamide]-2'-deoxyuridine
  misc_feature (15)..(16): n is 5-[N-(1-naphthylmethyl)carboxyamide]-2'-deoxyuridine
  misc_feature (18)..(18): n is 5-[N-(1-naphthylmethyl)carboxyamide]-2'-deoxyuridine
  misc_feature (23)..(25): n is 5-[N-(1-naphthylmethyl)carboxyamide]-2'-deoxyuridine
agccgnncaagngcnngnaggannn

SEQ ID NO: 582 - DNA, 31 bp, Artificial Sequence
  Synthetic
  misc_feature (5)..(6): n is 5-[N-(1-naphthylmethyl)carboxyamide]-2'-deoxyuridine
  misc_feature (11)..(11): n is 5-[N-(1-naphthylmethyl)carboxyamide]-2'-deoxyuridine
  misc_feature (14)..(15): n is 5-[N-(1-naphthylmethyl)carboxyamide]-2'-deoxyuridine
  misc_feature (17)..(17): n is 5-[N-(1-naphthylmethyl)carboxyamide]-2'-deoxyuridine
  misc_feature (22)..(24): n is 5-[N-(1-naphthylmethyl)carboxyamide]-2'-deoxyuridine
  misc_feature (28)..(28): n is 5-[N-(1-naphthylmethyl)carboxyamide]-2'-deoxyuridine
gccgnncaagngcnngnaggannnaaangga

SEQ ID NO: 583 - DNA, 30 bp, Artificial Sequence
  Synthetic
  misc_feature (4)..(5): n is 5-[N-(1-naphthylmethyl)carboxyamide]-2'-deoxyuridine
  misc_feature (10)..(10): n is 5-[N-(1-naphthylmethyl)carboxyamide]-2'-deoxyuridine
  misc_feature (13)..(14): n is 5-[N-(1-naphthylmethyl)carboxyamide]-2'-deoxyuridine
  misc_feature (16)..(16): n is 5-[N-(1-naphthylmethyl)carboxyamide]-2'-deoxyuridine
  misc_feature (21)..(23): n is 5-[N-(1-naphthylmethyl)carboxyamide]-2'-deoxyuridine
  misc_feature (27)..(27): n is 5-[N-(1-naphthylmethyl)carboxyamide]-2'-deoxyuridine
ccgnncaagngcnngnaggannnaaangga

SEQ ID NO: 584 - DNA, 29 bp, Artificial Sequence
  Synthetic
  misc_feature (3)..(4): n is 5-[N-(1-naphthylmethyl)carboxyamide]-2'-deoxyuridine
  misc_feature (9)..(9): n is 5-[N-(1-naphthylmethyl)carboxyamide]-2'-deoxyuridine
  misc_feature (12)..(13): n is 5-[N-(1-naphthylmethyl)carboxyamide]-2'-deoxyuridine
  misc_feature (15)..(15): n is 5-[N-(1-naphthylmethyl)carboxyamide]-2'-deoxyuridine
  misc_feature (20)..(22): n is 5-[N-(1-naphthylmethyl)carboxyamide]-2'-deoxyuridine
  misc_feature (26)..(26): n is 5-[N-(1-naphthylmethyl)carboxyamide]-2'-deoxyuridine
cgnncaagngcnngnaggannnaaangga

SEQ ID NO: 585 - DNA, 28 bp, Artificial Sequence
  Synthetic
  misc_feature (2)..(3): n is 5-[N-(1-naphthylmethyl)carboxyamide]-2'-deoxyuridine
  misc_feature (8)..(8): n is 5-[N-(1-naphthylmethyl)carboxyamide]-2'-deoxyuridine
  misc_feature (11)..(12): n is 5-[N-(1-naphthylmethyl)carboxyamide]-2'-deoxyuridine
  misc_feature (14)..(14): n is 5-[N-(1-naphthylmethyl)carboxyamide]-2'-deoxyuridine
  misc_feature (19)..(21): n is 5-[N-(1-naphthylmethyl)carboxyamide]-2'-deoxyuridine
  misc_feature (25)..(25): n is 5-[N-(1-naphthylmethyl)carboxyamide]-2'-deoxyuridine
gnncaagngcnngnaggannnaaangga

SEQ ID NO: 586 - DNA, 29 bp, Artificial Sequence
  Synthetic
  misc_feature (4)..(5): n is 5-[N-(1-naphthylmethyl)carboxyamide]-2'-deoxyuridine
  misc_feature (10)..(10): n is 5-[N-(1-naphthylmethyl)carboxyamide]-2'-deoxyuridine
  misc_feature (13)..(14): n is 5-[N-(1-naphthylmethyl)carboxyamide]-2'-deoxyuridine
  misc_feature (16)..(16): n is 5-[N-(1-naphthylmethyl)carboxyamide]-2'-deoxyuridine
  misc_feature (21)..(23): n is 5-[N-(1-naphthylmethyl)carboxyamide]-2'-deoxyuridine
  misc_feature (27)..(27): n is 5-[N-(1-naphthylmethyl)carboxyamide]-2'-deoxyuridine
ccgnncaagngcnngnaggannnaaangg

SEQ ID NO: 587 - DNA, 30 bp, Artificial Sequence
  Synthetic
  misc_feature (5)..(6): n is 5-[N-(1-naphthylmethyl)carboxyamide]-2'-deoxyuridine
  misc_feature (11)..(11): n is 5-[N-(1-naphthylmethyl)carboxyamide]-2'-deoxyuridine
  misc_feature (14)..(15): n is 5-[N-(1-naphthylmethyl)carboxyamide]-2'-deoxyuridine
  misc_feature (17)..(17): n is 5-[N-(1-naphthylmethyl)carboxyamide]-2'-deoxyuridine
  misc_feature (22)..(24): n is 5-[N-(1-naphthylmethyl)carboxyamide]-2'-deoxyuridine
  misc_feature (28)..(28): n is 5-[N-(1-naphthylmethyl)carboxyamide]-2'-deoxyuridine
gccgnncaagngcnngnaggannnaaangg

SEQ ID NO: 588 - DNA, 50 bp, Artificial Sequence
  Synthetic
  misc_feature (8)..(8): n is 5-[N-(1-naphthylmethyl)carboxyamide]-2'-deoxyuridine
  misc_feature (15)..(16): n is 5-[N-(1-naphthylmethyl)carboxyamide]-2'-deoxyuridine
  misc_feature (21)..(21): n is 5-[N-(1-naphthylmethyl)carboxyamide]-2'-deoxyuridine
  misc_feature (24)..(25): n is 5-[N-(1-naphthylmethyl)carboxyamide]-2'-deoxyuridine
  misc_feature (27)..(27): n is 5-[N-(1-naphthylmethyl)carboxyamide]-2'-deoxyuridine
  misc_feature (32)..(34): n is 5-[N-(1-naphthylmethyl)carboxyamide]-2'-deoxyuridine
  misc_feature (38)..(38): n is 5-[N-(1-naphthylmethyl)carboxyamide]-2'-deoxyuridine
  misc_feature (43)..(44): n is 5-[N-(1-naphthylmethyl)carboxyamide]-2'-deoxyuridine
ccctccancagccgnncaagngcnngnaggannnaaanggaannggagga

SEQ ID NO: 589 - DNA, 50 bp, Artificial Sequence
  Synthetic
  misc_feature (1)..(1): n is 1,3-propane diol
  misc_feature (8)..(8): n is 5-[N-(1-naphthylmethyl)carboxyamide]-2'-deoxyuridine
  misc_feature (15)..(16): n is 5-[N-(1-naphthylmethyl)carboxyamide]-2'-deoxyuridine
  misc_feature (21)..(21): n is 5-[N-(1-naphthylmethyl)carboxyamide]-2'-deoxyuridine
  misc_feature (24)..(25): n is 5-[N-(1-naphthylmethyl)carboxyamide]-2'-deoxyuridine
  misc_feature (27)..(27): n is 5-[N-(1-naphthylmethyl)carboxyamide]-2'-deoxyuridine
  misc_feature (32)..(34): n is 5-[N-(1-naphthylmethyl)carboxyamide]-2'-deoxyuridine
  misc_feature (38)..(38): n is 5-[N-(1-naphthylmethyl)carboxyamide]-2'-deoxyuridine
  misc_feature (43)..(44): n is 5-[N-(1-naphthylmethyl)carboxyamide]-2'-deoxyuridine
ncctccancagccgnncaagngcnngnaggannnaaanggaannggagga

SEQ ID NO: 590 - DNA, 50 bp, Artificial Sequence
  Synthetic
  misc_feature (2)..(2): n is 1,3-propane diol
  misc_feature (8)..(8): n is 5-[N-(1-naphthylmethyl)carboxyamide]-2'-deoxyuridine
  misc_feature (15)..(16): n is 5-[N-(1-naphthylmethyl)carboxyamide]-2'-deoxyuridine
  misc_feature (21)..(21): n is 5-[N-(1-naphthylmethyl)carboxyamide]-2'-deoxyuridine
  misc_feature (24)..(25): n is 5-[N-(1-naphthylmethyl)carboxyamide]-2'-deoxyuridine
  misc_feature (27)..(27): n is 5-[N-(1-naphthylmethyl)carboxyamide]-2'-deoxyuridine
  misc_feature (32)..(34): n is 5-[N-(1-naphthylmethyl)carboxyamide]-2'-deoxyuridine
  misc_feature (38)..(38): n is 5-[N-(1-naphthylmethyl)carboxyamide]-2'-deoxyuridine
  misc_feature (43)..(44): n is 5-[N-(1-naphthylmethyl)carboxyamide]-2'-deoxyuridine
cnctccancagccgnncaagngcnngnaggannnaaanggaannggagga

SEQ ID NO: 591 - DNA, 50 bp, Artificial Sequence
  Synthetic
  misc_feature (3)..(3): n is 1,3-propane diol
  misc_feature (8)..(8): n is 5-[N-(1-naphthylmethyl)carboxyamide]-2'-deoxyuridine
  misc_feature (15)..(16): n is 5-[N-(1-naphthylmethyl)carboxyamide]-2'-deoxyuridine
  misc_feature (21)..(21): n is 5-[N-(1-naphthylmethyl)carboxyamide]-2'-deoxyuridine
  misc_feature (24)..(25): n is 5-[N-(1-naphthylmethyl)carboxyamide]-2'-deoxyuridine
  misc_feature (27)..(27): n is 5-[N-(1-naphthylmethyl)carboxyamide]-2'-deoxyuridine
  misc_feature (32)..(34): n is 5-[N-(1-naphthylmethyl)carboxyamide]-2'-deoxyuridine
  misc_feature (38)..(38): n is 5-[N-(1-naphthylmethyl)carboxyamide]-2'-deoxyuridine
  misc_feature (43)..(44): n is 5-[N-(1-naphthylmethyl)carboxyamide]-2'-deoxyuridine
ccntccancagccgnncaagngcnngnaggannnaaanggaannggagga

SEQ ID NO: 592 - DNA, 50 bp, Artificial Sequence
  Synthetic
  misc_feature (4)..(4): n is 1,3-propane diol
  misc_feature (8)..(8): n is 5-[N-(1-naphthylmethyl)carboxyamide]-2'-deoxyuridine
  misc_feature (15)..(16): n is 5-[N-(1-naphthylmethyl)carboxyamide]-2'-deoxyuridine
  misc_feature (21)..(21): n is 5-[N-(1-naphthylmethyl)carboxyamide]-2'-deoxyuridine
  misc_feature (24)..(25): n is 5-[N-(1-naphthylmethyl)carboxyamide]-2'-deoxyuridine
  misc_feature (27)..(27): n is 5-[N-(1-naphthylmethyl)carboxyamide]-2'-deoxyuridine
  misc_feature (32)..(34): n is 5-[N-(1-naphthylmethyl)carboxyamide]-2'-deoxyuridine
  misc_feature (38)..(38): n is 5-[N-(1-naphthylmethyl)carboxyamide]-2'-deoxyuridine
  misc_feature (43)..(44): n is 5-[N-(1-naphthylmethyl)carboxyamide]-2'-deoxyuridine
cccnccancagccgnncaagngcnngnaggannnaaanggaannggagga

SEQ ID NO: 593 - DNA, 50 bp, Artificial Sequence
  Synthetic
  misc_feature (5)..(5): n is 1,3-propane diol
  misc_feature (8)..(8): n is 5-[N-(1-naphthylmethyl)carboxyamide]-2'-deoxyuridine
  misc_feature (15)..(16): n is 5-[N-(1-naphthylmethyl)carboxyamide]-2'-deoxyuridine
  misc_feature (21)..(21): n is 5-[N-(1-naphthylmethyl)carboxyamide]-2'-deoxyuridine
  misc_feature (24)..(25): n is 5-[N-(1-naphthylmethyl)carboxyamide]-2'-deoxyuridine
  misc_feature (27)..(27): n is 5-[N-(1-naphthylmethyl)carboxyamide]-2'-deoxyuridine
  misc_feature (32)..(34): n is 5-[N-(1-naphthylmethyl)carboxyamide]-2'-deoxyuridine
  misc_feature (38)..(38): n is 5-[N-(1-naphthylmethyl)carboxyamide]-2'-deoxyuridine
  misc_feature (43)..(44): n is 5-[N-(1-naphthylmethyl)carboxyamide]-2'-deoxyuridine
ccctncancagccgnncaagngcnngnaggannnaaanggaannggagga

SEQ ID NO: 594 - DNA, 50 bp, Artificial Sequence
  Synthetic
  misc_feature (6)..(6): n is 1,3-propane diol
  misc_feature (8)..(8): n is 5-[N-(1-naphthylmethyl)carboxyamide]-2'-deoxyuridine
  misc_feature (15)..(16): n is 5-[N-(1-naphthylmethyl)carboxyamide]-2'-deoxyuridine
  misc_feature (21)..(21): n is 5-[N-(1-naphthylmethyl)carboxyamide]-2'-deoxyuridine
  misc_feature (24)..(25): n is 5-[N-(1-naphthylmethyl)carboxyamide]-2'-deoxyuridine
  misc_feature (27)..(27): n is 5-[N-(1-naphthylmethyl)carboxyamide]-2'-deoxyuridine
  misc_feature (32)..(34): n is 5-[N-(1-naphthylmethyl)carboxyamide]-2'-deoxyuridine
  misc_feature (38)..(38): n is 5-[N-(1-naphthylmethyl)carboxyamide]-2'-deoxyuridine
  misc_feature (43)..(44): n is 5-[N-(1-naphthylmethyl)carboxyamide]-2'-deoxyuridine
ccctcnancagccgnncaagngcnngnaggannnaaanggaannggagga

SEQ ID NO: 595 - DNA, 50 bp, Artificial Sequence
  Synthetic
  misc_feature (7)..(7): n is 1,3-propane diol
  misc_feature (8)..(8): n is 5-[N-(1-naphthylmethyl)carboxyamide]-2'-deoxyuridine
  misc_feature (15)..(16): n is 5-[N-(1-naphthylmethyl)carboxyamide]-2'-deoxyuridine
  misc_feature (21)..(21): n is 5-[N-(1-naphthylmethyl)carboxyamide]-2'-deoxyuridine
  misc_feature (24)..(25): n is 5-[N-(1-naphthylmethyl)carboxyamide]-2'-deoxyuridine
  misc_feature (27)..(27): n is 5-[N-(1-naphthylmethyl)carboxyamide]-2'-deoxyuridine
  misc_feature (32)..(34): n is 5-[N-(1-naphthylmethyl)carboxyamide]-2'-deoxyuridine
  misc_feature (38)..(38): n is 5-[N-(1-naphthylmethyl)carboxyamide]-2'-deoxyuridine
  misc_feature (43)..(44): n is 5-[N-(1-naphthylmethyl)carboxyamide]-2'-deoxyuridine
ccctccnncagccgnncaagngcnngnaggannnaaanggaannggagga

SEQ ID NO: 596 - DNA, 50 bp, Artificial Sequence; identical to SEQ ID NO: 588
  Synthetic
  misc_feature (8)..(8): n is 1,3-propane diol
  misc_feature (15)..(16): n is 5-[N-(1-naphthylmethyl)carboxyamide]-2'-deoxyuridine
  misc_feature (21)..(21): n is 5-[N-(1-naphthylmethyl)carboxyamide]-2'-deoxyuridine
  misc_feature (24)..(25): n is 5-[N-(1-naphthylmethyl)carboxyamide]-2'-deoxyuridine
  misc_feature (27)..(27): n is 5-[N-(1-naphthylmethyl)carboxyamide]-2'-deoxyuridine
  misc_feature (32)..(34): n is 5-[N-(1-naphthylmethyl)carboxyamide]-2'-deoxyuridine
  misc_feature (38)..(38): n is 5-[N-(1-naphthylmethyl)carboxyamide]-2'-deoxyuridine
  misc_feature (43)..(44): n is 5-[N-(1-naphthylmethyl)carboxyamide]-2'-deoxyuridine

SEQ ID NO: 597 - DNA, 50 bp, Artificial Sequence
  Synthetic
  misc_feature (8)..(8): n is 5-[N-(1-naphthylmethyl)carboxyamide]-2'-deoxyuridine
  misc_feature (9)..(9): n is 1,3-propane diol
  misc_feature (15)..(16): n is 5-[N-(1-naphthylmethyl)carboxyamide]-2'-deoxyuridine
  misc_feature (21)..(21): n is 5-[N-(1-naphthylmethyl)carboxyamide]-2'-deoxyuridine
  misc_feature (24)..(25): n is 5-[N-(1-naphthylmethyl)carboxyamide]-2'-deoxyuridine
  misc_feature (27)..(27): n is 5-[N-(1-naphthylmethyl)carboxyamide]-2'-deoxyuridine
  misc_feature (32)..(34): n is 5-[N-(1-naphthylmethyl)carboxyamide]-2'-deoxyuridine
  misc_feature (38)..(38): n is 5-[N-(1-naphthylmethyl)carboxyamide]-2'-deoxyuridine
  misc_feature (43)..(44): n is 5-[N-(1-naphthylmethyl)carboxyamide]-2'-deoxyuridine
ccctccannagccgnncaagngcnngnaggannnaaanggaannggagga

SEQ ID NO: 598 - DNA, 50 bp, Artificial Sequence
  Synthetic
  misc_feature (8)..(8): n is 5-[N-(1-naphthylmethyl)carboxyamide]-2'-deoxyuridine
  misc_feature (10)..(10): n is 1,3-propane diol
  misc_feature (15)..(16): n is 5-[N-(1-naphthylmethyl)carboxyamide]-2'-deoxyuridine
  misc_feature (21)..(21): n is 5-[N-(1-naphthylmethyl)carboxyamide]-2'-deoxyuridine
  misc_feature (24)..(25): n is 5-[N-(1-naphthylmethyl)carboxyamide]-2'-deoxyuridine
  misc_feature (27)..(27): n is 5-[N-(1-naphthylmethyl)carboxyamide]-2'-deoxyuridine
  misc_feature (32)..(34): n is 5-[N-(1-naphthylmethyl)carboxyamide]-2'-deoxyuridine
  misc_feature (38)..(38): n is 5-[N-(1-naphthylmethyl)carboxyamide]-2'-deoxyuridine
  misc_feature (43)..(44): n is 5-[N-(1-naphthylmethyl)carboxyamide]-2'-deoxyuridine
ccctccancngccgnncaagngcnngnaggannnaaanggaannggagga

SEQ ID NO: 599 - DNA, 50 bp, Artificial Sequence
  Synthetic
  misc_feature (8)..(8): n is 5-[N-(1-naphthylmethyl)carboxyamide]-2'-deoxyuridine
  misc_feature (11)..(11): n is 1,3-propane diol
  misc_feature (15)..(16): n is 5-[N-(1-naphthylmethyl)carboxyamide]-2'-deoxyuridine
  misc_feature (21)..(21): n is 5-[N-(1-naphthylmethyl)carboxyamide]-2'-deoxyuridine
  misc_feature (24)..(25): n is 5-[N-(1-naphthylmethyl)carboxyamide]-2'-deoxyuridine
  misc_feature (27)..(27): n is 5-[N-(1-naphthylmethyl)carboxyamide]-2'-deoxyuridine
  misc_feature (32)..(34): n is 5-[N-(1-naphthylmethyl)carboxyamide]-2'-deoxyuridine
  misc_feature (38)..(38): n is 5-[N-(1-naphthylmethyl)carboxyamide]-2'-deoxyuridine
  misc_feature (43)..(44): n is 5-[N-(1-naphthylmethyl)carboxyamide]-2'-deoxyuridine
ccctccancanccgnncaagngcnngnaggannnaaanggaannggagga

SEQ ID NO: 600 - DNA, 50 bp, Artificial Sequence
  Synthetic
  misc_feature (8)..(8): n is 5-[N-(1-naphthylmethyl)carboxyamide]-2'-deoxyuridine
  misc_feature (12)..(12): n is 1,3-propane diol
  misc_feature (15)..(16): n is 5-[N-(1-naphthylmethyl)carboxyamide]-2'-deoxyuridine
  misc_feature (21)..(21): n is 5-[N-(1-naphthylmethyl)carboxyamide]-2'-deoxyuridine
  misc_feature (24)..(25): n is 5-[N-(1-naphthylmethyl)carboxyamide]-2'-deoxyuridine
  misc_feature (27)..(27): n is 5-[N-(1-naphthylmethyl)carboxyamide]-2'-deoxyuridine
  misc_feature (32)..(34): n is 5-[N-(1-naphthylmethyl)carboxyamide]-2'-deoxyuridine
  misc_feature (38)..(38): n is 5-[N-(1-naphthylmethyl)carboxyamide]-2'-deoxyuridine
  misc_feature (43)..(44): n is 5-[N-(1-naphthylmethyl)carboxyamide]-2'-deoxyuridine
ccctccancagncgnncaagngcnngnaggannnaaanggaannggagga

SEQ ID NO: 601 - DNA, 50 bp, Artificial Sequence
  Synthetic
  misc_feature (8)..(8): n is 5-[N-(1-naphthylmethyl)carboxyamide]-2'-deoxyuridine
  misc_feature (13)..(13): n is 1,3-propane diol
  misc_feature (15)..(16): n is 5-[N-(1-naphthylmethyl)carboxyamide]-2'-deoxyuridine
  misc_feature (21)..(21): n is 5-[N-(1-naphthylmethyl)carboxyamide]-2'-deoxyuridine
  misc_feature (24)..(25): n is 5-[N-(1-naphthylmethyl)carboxyamide]-2'-deoxyuridine
  misc_feature (27)..(27): n is 5-[N-(1-naphthylmethyl)carboxyamide]-2'-deoxyuridine
  misc_feature (32)..(34): n is 5-[N-(1-naphthylmethyl)carboxyamide]-2'-deoxyuridine
  misc_feature (38)..(38): n is 5-[N-(1-naphthylmethyl)carboxyamide]-2'-deoxyuridine
  misc_feature (43)..(44): n is 5-[N-(1-naphthylmethyl)carboxyamide]-2'-deoxyuridine
ccctccancagcngnncaagngcnngnaggannnaaanggaannggagga

SEQ ID NO: 602 - DNA, 50 bp, Artificial Sequence
  Synthetic
  misc_feature (8)..(8): n is 5-[N-(1-naphthylmethyl)carboxyamide]-2'-deoxyuridine
  misc_feature (14)..(14): n is 1,3-propane diol
  misc_feature (15)..(16): n is 5-[N-(1-naphthylmethyl)carboxyamide]-2'-deoxyuridine
  misc_feature (21)..(21): n is 5-[N-(1-naphthylmethyl)carboxyamide]-2'-deoxyuridine
  misc_feature (24)..(25): n is 5-[N-(1-naphthylmethyl)carboxyamide]-2'-deoxyuridine
  misc_feature (27)..(27): n is 5-[N-(1-naphthylmethyl)carboxyamide]-2'-deoxyuridine
  misc_feature (32)..(34): n is 5-[N-(1-naphthylmethyl)carboxyamide]-2'-deoxyuridine
  misc_feature (38)..(38): n is 5-[N-(1-naphthylmethyl)carboxyamide]-2'-deoxyuridine
  misc_feature (43)..(44): n is 5-[N-(1-naphthylmethyl)carboxyamide]-2'-deoxyuridine
ccctccancagccnnncaagngcnngnaggannnaaanggaannggagga

SEQ ID NO: 603 - DNA, 50 bp, Artificial Sequence; identical to SEQ ID NO: 588
  Synthetic
  misc_feature (8)..(8): n is 5-[N-(1-naphthylmethyl)carboxyamide]-2'-deoxyuridine
  misc_feature (15)..(15): n is 1,3-propane diol
  misc_feature (16)..(16): n is 5-[N-(1-naphthylmethyl)carboxyamide]-2'-deoxyuridine
  misc_feature (21)..(21): n is 5-[N-(1-naphthylmethyl)carboxyamide]-2'-deoxyuridine
  misc_feature (24)..(25): n is 5-[N-(1-naphthylmethyl)carboxyamide]-2'-deoxyuridine
  misc_feature (27)..(27): n is 5-[N-(1-naphthylmethyl)carboxyamide]-2'-deoxyuridine
  misc_feature (32)..(34): n is 5-[N-(1-naphthylmethyl)carboxyamide]-2'-deoxyuridine
  misc_feature (38)..(38): n is 5-[N-(1-naphthylmethyl)carboxyamide]-2'-deoxyuridine
  misc_feature (43)..(44): n is 5-[N-(1-naphthylmethyl)carboxyamide]-2'-deoxyuridine

SEQ ID NO: 604 - DNA, 50 bp, Artificial Sequence; identical to SEQ ID NO: 588
  Synthetic
  misc_feature (8)..(8): n is 5-[N-(1-naphthylmethyl)carboxyamide]-2'-deoxyuridine
  misc_feature (15)..(15): n is 5-[N-(1-naphthylmethyl)carboxyamide]-2'-deoxyuridine
  misc_feature (16)..(16): n is 1,3-propane diol
  misc_feature (21)..(21): n is 5-[N-(1-naphthylmethyl)carboxyamide]-2'-deoxyuridine
  misc_feature (24)..(25): n is 5-[N-(1-naphthylmethyl)carboxyamide]-2'-deoxyuridine
  misc_feature (27)..(27): n is 5-[N-(1-naphthylmethyl)carboxyamide]-2'-deoxyuridine
  misc_feature (32)..(34): n is 5-[N-(1-naphthylmethyl)carboxyamide]-2'-deoxyuridine
  misc_feature (38)..(38): n is 5-[N-(1-naphthylmethyl)carboxyamide]-2'-deoxyuridine
  misc_feature (43)..(44): n is 5-[N-(1-naphthylmethyl)carboxyamide]-2'-deoxyuridine

SEQ ID NO: 605 - DNA, 50 bp, Artificial Sequence
  Synthetic
  misc_feature (8)..(8): n is 5-[N-(1-naphthylmethyl)carboxyamide]-2'-deoxyuridine
  misc_feature (15)..(16): n is 5-[N-(1-naphthylmethyl)carboxyamide]-2'-deoxyuridine
  misc_feature (17)..(17): n is 1,3-propane diol
  misc_feature (21)..(21): n is 5-[N-(1-naphthylmethyl)carboxyamide]-2'-deoxyuridine
  misc_feature (24)..(25): n is 5-[N-(1-naphthylmethyl)carboxyamide]-2'-deoxyuridine
  misc_feature (27)..(27): n is 5-[N-(1-naphthylmethyl)carboxyamide]-2'-deoxyuridine
  misc_feature (32)..(34): n is 5-[N-(1-naphthylmethyl)carboxyamide]-2'-deoxyuridine
  misc_feature (38)..(38): n is 5-[N-(1-naphthylmethyl)carboxyamide]-2'-deoxyuridine
  misc_feature (43)..(44): n is 5-[N-(1-naphthylmethyl)carboxyamide]-2'-deoxyuridine
ccctccancagccgnnnaagngcnngnaggannnaaanggaannggagga

SEQ ID NO: 606 - DNA, 50 bp, Artificial Sequence
  Synthetic
  misc_feature (8)..(8): n is 5-[N-(1-naphthylmethyl)carboxyamide]-2'-deoxyuridine
  misc_feature (15)..(16): n is 5-[N-(1-naphthylmethyl)carboxyamide]-2'-deoxyuridine
  misc_feature (18)..(18): n is 1,3-propane diol
  misc_feature (21)..(21): n is 5-[N-(1-naphthylmethyl)carboxyamide]-2'-deoxyuridine
  misc_feature (24)..(25): n is 5-[N-(1-naphthylmethyl)carboxyamide]-2'-deoxyuridine
  misc_feature (27)..(27): n is 5-[N-(1-naphthylmethyl)carboxyamide]-2'-deoxyuridine
  misc_feature (32)..(34): n is 5-[N-(1-naphthylmethyl)carboxyamide]-2'-deoxyuridine
  misc_feature (38)..(38): n is 5-[N-(1-naphthylmethyl)carboxyamide]-2'-deoxyuridine
  misc_feature (43)..(44): n is 5-[N-(1-naphthylmethyl)carboxyamide]-2'-deoxyuridine
ccctccancagccgnncnagngcnngnaggannnaaanggaannggagga

SEQ ID NO: 607 - DNA, 50 bp, Artificial Sequence
  Synthetic
  misc_feature (8)..(8): n is 5-[N-(1-naphthylmethyl)carboxyamide]-2'-deoxyuridine
  misc_feature (15)..(16): n is 5-[N-(1-naphthylmethyl)carboxyamide]-2'-deoxyuridine
  misc_feature (19)..(19): n is 1,3-propane diol
  misc_feature (21)..(21): n is 5-[N-(1-naphthylmethyl)carboxyamide]-2'-deoxyuridine
  misc_feature (24)..(25): n is 5-[N-(1-naphthylmethyl)carboxyamide]-2'-deoxyuridine
  misc_feature (27)..(27): n is 5-[N-(1-naphthylmethyl)carboxyamide]-2'-deoxyuridine
  misc_feature (32)..(34): n is 5-[N-(1-naphthylmethyl)carboxyamide]-2'-deoxyuridine
  misc_feature (38)..(38): n is 5-[N-(1-naphthylmethyl)carboxyamide]-2'-deoxyuridine
  misc_feature (43)..(44): n is 5-[N-(1-naphthylmethyl)carboxyamide]-2'-deoxyuridine
ccctccancagccgnncangngcnngnaggannnaaanggaannggagga

SEQ ID NO: 608 - DNA, 50 bp, Artificial Sequence
  Synthetic
  misc_feature (8)..(8): n is 5-[N-(1-naphthylmethyl)carboxyamide]-2'-deoxyuridine
  misc_feature (15)..(16): n is 5-[N-(1-naphthylmethyl)carboxyamide]-2'-deoxyuridine
  misc_feature (20)..(20): n is 1,3-propane diol
  misc_feature (21)..(21): n is 5-[N-(1-naphthylmethyl)carboxyamide]-2'-deoxyuridine
  misc_feature (24)..(25): n is 5-[N-(1-naphthylmethyl)carboxyamide]-2'-deoxyuridine
  misc_feature (27)..(27): n is 5-[N-(1-naphthylmethyl)carboxyamide]-2'-deoxyuridine
  misc_feature (32)..(34): n is 5-[N-(1-naphthylmethyl)carboxyamide]-2'-deoxyuridine
  misc_feature (38)..(38): n is 5-[N-(1-naphthylmethyl)carboxyamide]-2'-deoxyuridine
  misc_feature (43)..(44): n is 5-[N-(1-naphthylmethyl)carboxyamide]-2'-deoxyuridine
ccctccancagccgnncaanngcnngnaggannnaaanggaannggagga

SEQ ID NO: 609 - DNA, 50 bp, Artificial Sequence; identical to SEQ ID NO: 588
  Synthetic
  misc_feature (8)..(8): n is 5-[N-(1-naphthylmethyl)carboxyamide]-2'-deoxyuridine
  misc_feature (15)..(16): n is 5-[N-(1-naphthylmethyl)carboxyamide]-2'-deoxyuridine
  misc_feature (21)..(21): n is 1,3-propane diol
  misc_feature (24)..(25): n is 5-[N-(1-naphthylmethyl)carboxyamide]-2'-deoxyuridine
  misc_feature (27)..(27): n is 5-[N-(1-naphthylmethyl)carboxyamide]-2'-deoxyuridine
  misc_feature (32)..(34): n is 5-[N-(1-naphthylmethyl)carboxyamide]-2'-deoxyuridine
  misc_feature (38)..(38): n is 5-[N-(1-naphthylmethyl)carboxyamide]-2'-deoxyuridine
  misc_feature (43)..(44): n is 5-[N-(1-naphthylmethyl)carboxyamide]-2'-deoxyuridine

SEQ ID NO: 610 - DNA, 50 bp, Artificial Sequence
  Synthetic
  misc_feature (8)..(8): n is 5-[N-(1-naphthylmethyl)carboxyamide]-2'-deoxyuridine
  misc_feature (15)..(16): n is 5-[N-(1-naphthylmethyl)carboxyamide]-2'-deoxyuridine
  misc_feature (21)..(21): n is 5-[N-(1-naphthylmethyl)carboxyamide]-2'-deoxyuridine
  misc_feature (22)..(22): n is 1,3-propane diol
  misc_feature (24)..(25): n is 5-[N-(1-naphthylmethyl)carboxyamide]-2'-deoxyuridine
  misc_feature (27)..(27): n is 5-[N-(1-naphthylmethyl)carboxyamide]-2'-deoxyuridine
  misc_feature (32)..(34): n is 5-[N-(1-naphthylmethyl)carboxyamide]-2'-deoxyuridine
  misc_feature (38)..(38): n is 5-[N-(1-naphthylmethyl)carboxyamide]-2'-deoxyuridine
  misc_feature (43)..(44): n is 5-[N-(1-naphthylmethyl)carboxyamide]-2'-deoxyuridine
ccctccancagccgnncaagnncnngnaggannnaaanggaannggagga

SEQ ID NO: 611 - DNA, 50 bp, Artificial Sequence
  Synthetic
  misc_feature (8)..(8): n is 5-[N-(1-naphthylmethyl)carboxyamide]-2'-deoxyuridine
  misc_feature (15)..(16): n is 5-[N-(1-naphthylmethyl)carboxyamide]-2'-deoxyuridine
  misc_feature (21)..(21): n is 5-[N-(1-naphthylmethyl)carboxyamide]-2'-deoxyuridine
  misc_feature (23)..(23): n is 1,3-propane diol
  misc_feature (24)..(25): n is 5-[N-(1-naphthylmethyl)carboxyamide]-2'-deoxyuridine
  misc_feature (27)..(27): n is 5-[N-(1-naphthylmethyl)carboxyamide]-2'-deoxyuridine
  misc_feature (32)..(34): n is 5-[N-(1-naphthylmethyl)carboxyamide]-2'-deoxyuridine
  misc_feature (38)..(38): n is 5-[N-(1-naphthylmethyl)carboxyamide]-2'-deoxyuridine
  misc_feature (43)..(44): n is 5-[N-(1-naphthylmethyl)carboxyamide]-2'-deoxyuridine
ccctccancagccgnncaagngnnngnaggannnaaanggaannggagga

SEQ ID NO: 612 - DNA, 50 bp, Artificial Sequence; identical to SEQ ID NO: 588
  Synthetic
  misc_feature (8)..(8): n is 5-[N-(1-naphthylmethyl)carboxyamide]-2'-deoxyuridine
  misc_feature (15)..(16): n is 5-[N-(1-naphthylmethyl)carboxyamide]-2'-deoxyuridine
  misc_feature (21)..(21): n is 5-[N-(1-naphthylmethyl)carboxyamide]-2'-deoxyuridine
  misc_feature (24)..(24): n is 1,3-propane diol
  misc_feature (25)..(25): n is 5-[N-(1-naphthylmethyl)carboxyamide]-2'-deoxyuridine
  misc_feature (27)..(27): n is 5-[N-(1-naphthylmethyl)carboxyamide]-2'-deoxyuridine
  misc_feature (32)..(34): n is 5-[N-(1-naphthylmethyl)carboxyamide]-2'-deoxyuridine
  misc_feature (38)..(38): n is 5-[N-(1-naphthylmethyl)carboxyamide]-2'-deoxyuridine
  misc_feature (43)..(44): n is 5-[N-(1-naphthylmethyl)carboxyamide]-2'-deoxyuridine

SEQ ID NO: 613 - DNA, 50 bp, Artificial Sequence; identical to SEQ ID NO: 588
  Synthetic
  misc_feature (8)..(8): n is 5-[N-(1-naphthylmethyl)carboxyamide]-2'-deoxyuridine
  misc_feature (15)..(16): n is 5-[N-(1-naphthylmethyl)carboxyamide]-2'-deoxyuridine
  misc_feature (21)..(21): n is 5-[N-(1-naphthylmethyl)carboxyamide]-2'-deoxyuridine
  misc_feature (24)..(24): n is 5-[N-(1-naphthylmethyl)carboxyamide]-2'-deoxyuridine
  misc_feature (25)..(25): n is 1,3-propane diol
  misc_feature (27)..(27): n is 5-[N-(1-naphthylmethyl)carboxyamide]-2'-deoxyuridine
  misc_feature (32)..(34): n is 5-[N-(1-naphthylmethyl)carboxyamide]-2'-deoxyuridine
  misc_feature (38)..(38): n is 5-[N-(1-naphthylmethyl)carboxyamide]-2'-deoxyuridine
  misc_feature (43)..(44): n is 5-[N-(1-naphthylmethyl)carboxyamide]-2'-deoxyuridine

SEQ ID NO: 614 - DNA, 50 bp, Artificial Sequence
  Synthetic
  misc_feature (8)..(8): n is 5-[N-(1-naphthylmethyl)carboxyamide]-2'-deoxyuridine
  misc_feature (15)..(16): n is 5-[N-(1-naphthylmethyl)carboxyamide]-2'-deoxyuridine
  misc_feature (21)..(21): n is 5-[N-(1-naphthylmethyl)carboxyamide]-2'-deoxyuridine
  misc_feature (24)..(25): n is 5-[N-(1-naphthylmethyl)carboxyamide]-2'-deoxyuridine
  misc_feature (26)..(26): n is 1,3-propane diol
  misc_feature (27)..(27): n is 5-[N-(1-naphthylmethyl)carboxyamide]-2'-deoxyuridine
  misc_feature (32)..(34): n is 5-[N-(1-naphthylmethyl)carboxyamide]-2'-deoxyuridine
  misc_feature (38)..(38): n is 5-[N-(1-naphthylmethyl)carboxyamide]-2'-deoxyuridine
  misc_feature (43)..(44): n is 5-[N-(1-naphthylmethyl)carboxyamide]-2'-deoxyuridine
ccctccancagccgnncaagngcnnnnaggannnaaanggaannggagga

SEQ ID NO: 615 - DNA, 50 bp, Artificial Sequence; identical to SEQ ID NO: 588
  Synthetic
  misc_feature (8)..(8): n is 5-[N-(1-naphthylmethyl)carboxyamide]-2'-deoxyuridine
  misc_feature (15)..(16): n is 5-[N-(1-naphthylmethyl)carboxyamide]-2'-deoxyuridine
  misc_feature (21)..(21): n is 5-[N-(1-naphthylmethyl)carboxyamide]-2'-deoxyuridine
  misc_feature (24)..(25): n is 5-[N-(1-naphthylmethyl)carboxyamide]-2'-deoxyuridine
  misc_feature (27)..(27): n is 1,3-propane diol
  misc_feature (32)..(34): n is 5-[N-(1-naphthylmethyl)carboxyamide]-2'-deoxyuridine
  misc_feature (38)..(38): n is 5-[N-(1-naphthylmethyl)carboxyamide]-2'-deoxyuridine
  misc_feature (43)..(44): n is 5-[N-(1-naphthylmethyl)carboxyamide]-2'-deoxyuridine

SEQ ID NO: 616 - DNA, 50 bp, Artificial Sequence
  Synthetic
  misc_feature (8)..(8): n is 5-[N-(1-naphthylmethyl)carboxyamide]-2'-deoxyuridine
  misc_feature (15)..(16): n is 5-[N-(1-naphthylmethyl)carboxyamide]-2'-deoxyuridine
  misc_feature (21)..(21): n is 5-[N-(1-naphthylmethyl)carboxyamide]-2'-deoxyuridine
  misc_feature (24)..(25): n is 5-[N-(1-naphthylmethyl)carboxyamide]-2'-deoxyuridine
  misc_feature (27)..(27): n is 5-[N-(1-naphthylmethyl)carboxyamide]-2'-deoxyuridine
  misc_feature (28)..(28): n is 1,3-propane diol
  misc_feature (32)..(34): n is 5-[N-(1-naphthylmethyl)carboxyamide]-2'-deoxyuridine
  misc_feature (38)..(38): n is 5-[N-(1-naphthylmethyl)carboxyamide]-2'-deoxyuridine
  misc_feature (43)..(44): n is 5-[N-(1-naphthylmethyl)carboxyamide]-2'-deoxyuridine
ccctccancagccgnncaagngcnngnnggannnaaanggaannggagga

SEQ ID NO: 617 - DNA, 50 bp, Artificial Sequence
  Synthetic
  misc_feature (8)..(8): n is 5-[N-(1-naphthylmethyl)carboxyamide]-2'-deoxyuridine
  misc_feature (15)..(16): n is 5-[N-(1-naphthylmethyl)carboxyamide]-2'-deoxyuridine
  misc_feature (21)..(21): n is 5-[N-(1-naphthylmethyl)carboxyamide]-2'-deoxyuridine
  misc_feature (24)..(25): n is 5-[N-(1-naphthylmethyl)carboxyamide]-2'-deoxyuridine
  misc_feature (27)..(27): n is 5-[N-(1-naphthylmethyl)carboxyamide]-2'-deoxyuridine
  misc_feature (29)..(29): n is 1,3-propane diol
  misc_feature (32)..(34): n is 5-[N-(1-naphthylmethyl)carboxyamide]-2'-deoxyuridine
  misc_feature (38)..(38): n is 5-[N-(1-naphthylmethyl)carboxyamide]-2'-deoxyuridine
  misc_feature (43)..(44): n is 5-[N-(1-naphthylmethyl)carboxyamide]-2'-deoxyuridine
ccctccancagccgnncaagngcnngnangannnaaanggaannggagga

SEQ ID NO: 618 - DNA, 50 bp, Artificial Sequence
  Synthetic
  misc_feature (8)..(8): n is 5-[N-(1-naphthylmethyl)carboxyamide]-2'-deoxyuridine
  misc_feature (15)..(16): n is 5-[N-(1-naphthylmethyl)carboxyamide]-2'-deoxyuridine
  misc_feature (21)..(21): n is 5-[N-(1-naphthylmethyl)carboxyamide]-2'-deoxyuridine
  misc_feature (24)..(25): n is 5-[N-(1-naphthylmethyl)carboxyamide]-2'-deoxyuridine
  misc_feature (27)..(27): n is 5-[N-(1-naphthylmethyl)carboxyamide]-2'-deoxyuridine
  misc_feature (30)..(30): n is 1,3-propane diol
  misc_feature (32)..(34): n is 5-[N-(1-naphthylmethyl)carboxyamide]-2'-deoxyuridine
  misc_feature (38)..(38): n is 5-[N-(1-naphthylmethyl)carboxyamide]-2'-deoxyuridine
  misc_feature (43)..(44): n is 5-[N-(1-naphthylmethyl)carboxyamide]-2'-deoxyuridine
ccctccancagccgnncaagngcnngnagnannnaaanggaannggagga

SEQ ID NO: 619 - DNA, 50 bp, Artificial Sequence
  Synthetic
  misc_feature (8)..(8): n is 5-[N-(1-naphthylmethyl)carboxyamide]-2'-deoxyuridine
  misc_feature (15)..(16): n is 5-[N-(1-naphthylmethyl)carboxyamide]-2'-deoxyuridine
  misc_feature (21)..(21): n is 5-[N-(1-naphthylmethyl)carboxyamide]-2'-deoxyuridine
  misc_feature (24)..(25): n is 5-[N-(1-naphthylmethyl)carboxyamide]-2'-deoxyuridine
  misc_feature (27)..(27): n is 5-[N-(1-naphthylmethyl)carboxyamide]-2'-deoxyuridine
  misc_feature (31)..(31): n is 1,3-propane diol
  misc_feature (32)..(34): n is 5-[N-(1-naphthylmethyl)carboxyamide]-2'-deoxyuridine
  misc_feature (38)..(38): n is 5-[N-(1-naphthylmethyl)carboxyamide]-2'-deoxyuridine
  misc_feature (43)..(44): n is 5-[N-(1-naphthylmethyl)carboxyamide]-2'-deoxyuridine
ccctccancagccgnncaagngcnngnaggnnnnaaanggaannggagga

SEQ ID NO: 620 - DNA, 50 bp, Artificial Sequence; identical to SEQ ID NO: 588
  Synthetic
  misc_feature (8)..(8): n is 5-[N-(1-naphthylmethyl)carboxyamide]-2'-deoxyuridine
  misc_feature (15)..(16): n is 5-[N-(1-naphthylmethyl)carboxyamide]-2'-deoxyuridine
  misc_feature (21)..(21): n is 5-[N-(1-naphthylmethyl)carboxyamide]-2'-deoxyuridine
  misc_feature (24)..(25): n is 5-[N-(1-naphthylmethyl)carboxyamide]-2'-deoxyuridine
  misc_feature (27)..(27): n is 5-[N-(1-naphthylmethyl)carboxyamide]-2'-deoxyuridine
  misc_feature (32)..(32): n is 1,3-propane diol
  misc_feature (33)..(34): n is 5-[N-(1-naphthylmethyl)carboxyamide]-2'-deoxyuridine
  misc_feature (38)..(38): n is 5-[N-(1-naphthylmethyl)carboxyamide]-2'-deoxyuridine
  misc_feature (43)..(44): n is 5-[N-(1-naphthylmethyl)carboxyamide]-2'-deoxyuridine

SEQ ID NO: 621 - DNA, 50 bp, Artificial Sequence; identical to SEQ ID NO: 588
  Synthetic
  misc_feature (8)..(8): n is 5-[N-(1-naphthylmethyl)carboxyamide]-2'-deoxyuridine
  misc_feature (15)..(16): n is 5-[N-(1-naphthylmethyl)carboxyamide]-2'-deoxyuridine
  misc_feature (21)..(21): n is 5-[N-(1-naphthylmethyl)carboxyamide]-2'-deoxyuridine
  misc_feature (24)..(25): n is 5-[N-(1-naphthylmethyl)carboxyamide]-2'-deoxyuridine
  misc_feature (27)..(27): n is 5-[N-(1-naphthylmethyl)carboxyamide]-2'-deoxyuridine
  misc_feature (32)..(32): n is 5-[N-(1-naphthylmethyl)carboxyamide]-2'-deoxyuridine
  misc_feature (33)..(33): n is 1,3-propane diol
  misc_feature (34)..(34): n is 5-[N-(1-naphthylmethyl)carboxyamide]-2'-deoxyuridine
  misc_feature (38)..(38): n is 5-[N-(1-naphthylmethyl)carboxyamide]-2'-deoxyuridine
  misc_feature (43)..(44): n is 5-[N-(1-naphthylmethyl)carboxyamide]-2'-deoxyuridine

SEQ ID NO: 622 - DNA, 50 bp, Artificial Sequence; identical to SEQ ID NO: 588
  Synthetic
  misc_feature (8)..(8): n is 5-[N-(1-naphthylmethyl)carboxyamide]-2'-deoxyuridine
  misc_feature (15)..(16): n is 5-[N-(1-naphthylmethyl)carboxyamide]-2'-deoxyuridine
  misc_feature (21)..(21): n is 5-[N-(1-naphthylmethyl)carboxyamide]-2'-deoxyuridine
  misc_feature (24)..(25): n is 5-[N-(1-naphthylmethyl)carboxyamide]-2'-deoxyuridine
  misc_feature (27)..(27): n is 5-[N-(1-naphthylmethyl)carboxyamide]-2'-deoxyuridine
  misc_feature (32)..(33): n is 5-[N-(1-naphthylmethyl)carboxyamide]-2'-deoxyuridine
  misc_feature (34)..(34): n is 1,3-propane diol
  misc_feature (38)..(38): n is 5-[N-(1-naphthylmethyl)carboxyamide]-2'-deoxyuridine
  misc_feature (43)..(44): n is 5-[N-(1-naphthylmethyl)carboxyamide]-2'-deoxyuridine

SEQ ID NO: 623 - DNA, 50 bp, Artificial Sequence
  Synthetic
  misc_feature (8)..(8): n is 5-[N-(1-naphthylmethyl)carboxyamide]-2'-deoxyuridine
  misc_feature (15)..(16): n is 5-[N-(1-naphthylmethyl)carboxyamide]-2'-deoxyuridine
  misc_feature (21)..(21): n is 5-[N-(1-naphthylmethyl)carboxyamide]-2'-deoxyuridine
  misc_feature (24)..(25): n is 5-[N-(1-naphthylmethyl)carboxyamide]-2'-deoxyuridine
  misc_feature (27)..(27): n is 5-[N-(1-naphthylmethyl)carboxyamide]-2'-deoxyuridine
  misc_feature (32)..(34): n is 5-[N-(1-naphthylmethyl)carboxyamide]-2'-deoxyuridine
  misc_feature (35)..(35): n is 1,3-propane diol
  misc_feature (38)..(38): n is 5-[N-(1-naphthylmethyl)carboxyamide]-2'-deoxyuridine
  misc_feature (43)..(44): n is 5-[N-(1-naphthylmethyl)carboxyamide]-2'-deoxyuridine
ccctccancagccgnncaagngcnngnaggannnnaanggaannggagga

SEQ ID NO: 624 - DNA, 50 bp, Artificial Sequence
  Synthetic
  misc_feature (8)..(8): n is 5-[N-(1-naphthylmethyl)carboxyamide]-2'-deoxyuridine
  misc_feature (15)..(16): n is 5-[N-(1-naphthylmethyl)carboxyamide]-2'-deoxyuridine
  misc_feature (21)..(21): n is 5-[N-(1-naphthylmethyl)carboxyamide]-2'-deoxyuridine
  misc_feature (24)..(25): n is 5-[N-(1-naphthylmethyl)carboxyamide]-2'-deoxyuridine
  misc_feature (27)..(27): n is 5-[N-(1-naphthylmethyl)carboxyamide]-2'-deoxyuridine
  misc_feature (32)..(34): n is 5-[N-(1-naphthylmethyl)carboxyamide]-2'-deoxyuridine
  misc_feature (36)..(36): n is 1,3-propane diol
  misc_feature (38)..(38): n is 5-[N-(1-naphthylmethyl)carboxyamide]-2'-deoxyuridine
  misc_feature (43)..(44): n is 5-[N-(1-naphthylmethyl)carboxyamide]-2'-deoxyuridine
ccctccancagccgnncaagngcnngnaggannnananggaannggagga

SEQ ID NO: 625 - DNA, 50 bp, Artificial Sequence
  Synthetic
  misc_feature (8)..(8): n is 5-[N-(1-naphthylmethyl)carboxyamide]-2'-deoxyuridine
  misc_feature (15)..(16): n is 5-[N-(1-naphthylmethyl)carboxyamide]-2'-deoxyuridine
  misc_feature (21)..(21): n is 5-[N-(1-naphthylmethyl)carboxyamide]-2'-deoxyuridine
  misc_feature (24)..(25): n is 5-[N-(1-naphthylmethyl)carboxyamide]-2'-deoxyuridine
  misc_feature (27)..(27): n is 5-[N-(1-naphthylmethyl)carboxyamide]-2'-deoxyuridine
  misc_feature (32)..(34): n is 5-[N-(1-naphthylmethyl)carboxyamide]-2'-deoxyuridine
  misc_feature (37)..(37): n is 1,3-propane diol
  misc_feature (38)..(38): n is 5-[N-(1-naphthylmethyl)carboxyamide]-2'-deoxyuridine
  misc_feature (43)..(44): n is 5-[N-(1-naphthylmethyl)carboxyamide]-2'-deoxyuridine
ccctccancagccgnncaagngcnngnaggannnaannggaannggagga

SEQ ID NO: 626 - DNA, 50 bp, Artificial Sequence; identical to SEQ ID NO: 588
  Synthetic
  misc_feature (8)..(8): n is 5-[N-(1-naphthylmethyl)carboxyamide]-2'-deoxyuridine
  misc_feature (15)..(16): n is 5-[N-(1-naphthylmethyl)carboxyamide]-2'-deoxyuridine
  misc_feature (21)..(21): n is 5-[N-(1-naphthylmethyl)carboxyamide]-2'-deoxyuridine
  misc_feature (24)..(25): n is 5-[N-(1-naphthylmethyl)carboxyamide]-2'-deoxyuridine
  misc_feature (27)..(27): n is 5-[N-(1-naphthylmethyl)carboxyamide]-2'-deoxyuridine
  misc_feature (32)..(34): n is 5-[N-(1-naphthylmethyl)carboxyamide]-2'-deoxyuridine
  misc_feature (38)..(38): n is 1,3-propane diol
  misc_feature (43)..(44): n is 5-[N-(1-naphthylmethyl)carboxyamide]-2'-deoxyuridine

SEQ ID NO: 627 - DNA, 50 bp, Artificial Sequence
  Synthetic
  misc_feature (8)..(8): n is 5-[N-(1-naphthylmethyl)carboxyamide]-2'-deoxyuridine
  misc_feature (15)..(16): n is 5-[N-(1-naphthylmethyl)carboxyamide]-2'-deoxyuridine
  misc_feature (21)..(21): n is 5-[N-(1-naphthylmethyl)carboxyamide]-2'-deoxyuridine
  misc_feature (24)..(25): n is 5-[N-(1-naphthylmethyl)carboxyamide]-2'-deoxyuridine
  misc_feature (27)..(27): n is 5-[N-(1-naphthylmethyl)carboxyamide]-2'-deoxyuridine
  misc_feature (32)..(34): n is 5-[N-(1-naphthylmethyl)carboxyamide]-2'-deoxyuridine
  misc_feature (38)..(38): n is 5-[N-(1-naphthylmethyl)carboxyamide]-2'-deoxyuridine
  misc_feature (39)..(39): n is 1,3-propane diol
  misc_feature (43)..(44): n is 5-[N-(1-naphthylmethyl)carboxyamide]-2'-deoxyuridine
ccctccancagccgnncaagngcnngnaggannnaaanngaannggagga

SEQ ID NO: 628 - DNA, 50 bp, Artificial Sequence
  Synthetic
  misc_feature (8)..(8): n is 5-[N-(1-naphthylmethyl)carboxyamide]-2'-deoxyuridine
  misc_feature (15)..(16): n is 5-[N-(1-naphthylmethyl)carboxyamide]-2'-deoxyuridine
  misc_feature (21)..(21): n is 5-[N-(1-naphthylmethyl)carboxyamide]-2'-deoxyuridine
  misc_feature (24)..(25): n is 5-[N-(1-naphthylmethyl)carboxyamide]-2'-deoxyuridine
  misc_feature (27)..(27): n is 5-[N-(1-naphthylmethyl)carboxyamide]-2'-deoxyuridine
  misc_feature (32)..(34): n is 5-[N-(1-naphthylmethyl)carboxyamide]-2'-deoxyuridine
  misc_feature (38)..(38): n is 5-[N-(1-naphthylmethyl)carboxyamide]-2'-deoxyuridine
  misc_feature (40)..(40): n is 1,3-propane diol
  misc_feature (43)..(44): n is 5-[N-(1-naphthylmethyl)carboxyamide]-2'-deoxyuridine
ccctccancagccgnncaagngcnngnaggannnaaangnaannggagga

SEQ ID NO: 629 - DNA, 50 bp, Artificial Sequence
  Synthetic
  misc_feature (8)..(8): n is 5-[N-(1-naphthylmethyl)carboxyamide]-2'-deoxyuridine
  misc_feature (15)..(16): n is 5-[N-(1-naphthylmethyl)carboxyamide]-2'-deoxyuridine
  misc_feature (21)..(21): n is 5-[N-(1-naphthylmethyl)carboxyamide]-2'-deoxyuridine
  misc_feature (24)..(25): n is 5-[N-(1-naphthylmethyl)carboxyamide]-2'-deoxyuridine
  misc_feature (27)..(27): n is 5-[N-(1-naphthylmethyl)carboxyamide]-2'-deoxyuridine
  misc_feature (32)..(34): n is 5-[N-(1-naphthylmethyl)carboxyamide]-2'-deoxyuridine
  misc_feature (38)..(38): n is 5-[N-(1-naphthylmethyl)carboxyamide]-2'-deoxyuridine
  misc_feature (41)..(41): n is 1,3-propane diol
  misc_feature (43)..(44): n is 5-[N-(1-naphthylmethyl)carboxyamide]-2'-deoxyuridine
ccctccancagccgnncaagngcnngnaggannnaaanggnannggagga

SEQ ID NO: 630 - DNA, 50 bp, Artificial Sequence
  Synthetic
  misc_feature (8)..(8): n is 5-[N-(1-naphthylmethyl)carboxyamide]-2'-deoxyuridine
  misc_feature (15)..(16): n is 5-[N-(1-naphthylmethyl)carboxyamide]-2'-deoxyuridine
  misc_feature (21)..(21): n is 5-[N-(1-naphthylmethyl)carboxyamide]-2'-deoxyuridine
  misc_feature (24)..(25): n is 5-[N-(1-naphthylmethyl)carboxyamide]-2'-deoxyuridine
  misc_feature (27)..(27): n is 5-[N-(1-naphthylmethyl)carboxyamide]-2'-deoxyuridine
  misc_feature (32)..(34): n is 5-[N-(1-naphthylmethyl)carboxyamide]-2'-deoxyuridine
  misc_feature (38)..(38): n is 5-[N-(1-naphthylmethyl)carboxyamide]-2'-deoxyuridine
  misc_feature (42)..(42): n is 1,3-propane diol
  misc_feature (43)..(44): n is 5-[N-(1-naphthylmethyl)carboxyamide]-2'-deoxyuridine
ccctccancagccgnncaagngcnngnaggannnaaanggannnggagga

SEQ ID NO: 631 - DNA, 50 bp, Artificial Sequence; identical to SEQ ID NO: 588
  Synthetic
  misc_feature (8)..(8): n is 5-[N-(1-naphthylmethyl)carboxyamide]-2'-deoxyuridine
  misc_feature (15)..(16): n is 5-[N-(1-naphthylmethyl)carboxyamide]-2'-deoxyuridine
  misc_feature (21)..(21): n is 5-[N-(1-naphthylmethyl)carboxyamide]-2'-deoxyuridine
  misc_feature (24)..(25): n is 5-[N-(1-naphthylmethyl)carboxyamide]-2'-deoxyuridine
  misc_feature (27)..(27): n is 5-[N-(1-naphthylmethyl)carboxyamide]-2'-deoxyuridine
  misc_feature (32)..(34): n is 5-[N-(1-naphthylmethyl)carboxyamide]-2'-deoxyuridine
  misc_feature (38)..(38): n is 5-[N-(1-naphthylmethyl)carboxyamide]-2'-deoxyuridine
  misc_feature (43)..(43): n is 1,3-propane diol
  misc_feature (44)..(44): n is 5-[N-(1-naphthylmethyl)carboxyamide]-2'-deoxyuridine

SEQ ID NO: 632 - DNA, 50 bp, Artificial Sequence; identical to SEQ ID NO: 588
  Synthetic
  misc_feature (8)..(8): n is 5-[N-(1-naphthylmethyl)carboxyamide]-2'-deoxyuridine
  misc_feature (15)..(16): n is 5-[N-(1-naphthylmethyl)carboxyamide]-2'-deoxyuridine
  misc_feature (21)..(21): n is 5-[N-(1-naphthylmethyl)carboxyamide]-2'-deoxyuridine
  misc_feature (24)..(25): n is 5-[N-(1-naphthylmethyl)carboxyamide]-2'-deoxyuridine
  misc_feature (27)..(27): n is 5-[N-(1-naphthylmethyl)carboxyamide]-2'-deoxyuridine
  misc_feature (32)..(34): n is 5-[N-(1-naphthylmethyl)carboxyamide]-2'-deoxyuridine
  misc_feature (38)..(38): n is 5-[N-(1-naphthylmethyl)carboxyamide]-2'-deoxyuridine
  misc_feature (43)..(43): n is 5-[N-(1-naphthylmethyl)carboxyamide]-2'-deoxyuridine
  misc_feature (44)..(44): n is 1,3-propane diol

SEQ ID NO: 633 - DNA, 50 bp, Artificial Sequence
  Synthetic
  misc_feature (8)..(8): n is 5-[N-(1-naphthylmethyl)carboxyamide]-2'-deoxyuridine
  misc_feature (15)..(16): n is 5-[N-(1-naphthylmethyl)carboxyamide]-2'-deoxyuridine
  misc_feature (21)..(21): n is 5-[N-(1-naphthylmethyl)carboxyamide]-2'-deoxyuridine
  misc_feature (24)..(25): n is 5-[N-(1-naphthylmethyl)carboxyamide]-2'-deoxyuridine
  misc_feature (27)..(27): n is 5-[N-(1-naphthylmethyl)carboxyamide]-2'-deoxyuridine
  misc_feature (32)..(34): n is 5-[N-(1-naphthylmethyl)carboxyamide]-2'-deoxyuridine
  misc_feature (38)..(38): n is 5-[N-(1-naphthylmethyl)carboxyamide]-2'-deoxyuridine
  misc_feature (43)..(44): n is 5-[N-(1-naphthylmethyl)carboxyamide]-2'-deoxyuridine
  misc_feature (45)..(45): n is 1,3-propane diol
ccctccancagccgnncaagngcnngnaggannnaaanggaannngagga

SEQ ID NO: 634 - DNA, 50 bp, Artificial Sequence
  Synthetic
  misc_feature (8)..(8): n is 5-[N-(1-naphthylmethyl)carboxyamide]-2'-deoxyuridine
  misc_feature (15)..(16): n is 5-[N-(1-naphthylmethyl)carboxyamide]-2'-deoxyuridine
  misc_feature (21)..(21): n is 5-[N-(1-naphthylmethyl)carboxyamide]-2'-deoxyuridine
  misc_feature (24)..(25): n is 5-[N-(1-naphthylmethyl)carboxyamide]-2'-deoxyuridine
  misc_feature (27)..(27): n is 5-[N-(1-naphthylmethyl)carboxyamide]-2'-deoxyuridine
  misc_feature (32)..(34): n is 5-[N-(1-naphthylmethyl)carboxyamide]-2'-deoxyuridine
  misc_feature (38)..(38): n is 5-[N-(1-naphthylmethyl)carboxyamide]-2'-deoxyuridine
  misc_feature (43)..(44): n is 5-[N-(1-naphthylmethyl)carboxyamide]-2'-deoxyuridine
  misc_feature (46)..(46): n is 1,3-propane diol
ccctccancagccgnncaagngcnngnaggannnaaanggaanngnagga

SEQ ID NO: 635 - DNA, 50 bp, Artificial Sequence
  Synthetic
  misc_feature (8)..(8): n is 5-[N-(1-naphthylmethyl)carboxyamide]-2'-deoxyuridine
  misc_feature (15)..(16): n is 5-[N-(1-naphthylmethyl)carboxyamide]-2'-deoxyuridine
  misc_feature (21)..(21): n is 5-[N-(1-naphthylmethyl)carboxyamide]-2'-deoxyuridine
  misc_feature (24)..(25): n is 5-[N-(1-naphthylmethyl)carboxyamide]-2'-deoxyuridine
  misc_feature (27)..(27): n is 5-[N-(1-naphthylmethyl)carboxyamide]-2'-deoxyuridine
  misc_feature (32)..(34): n is 5-[N-(1-naphthylmethyl)carboxyamide]-2'-deoxyuridine
  misc_feature (38)..(38): n is 5-[N-(1-naphthylmethyl)carboxyamide]-2'-deoxyuridine
  misc_feature (43)..(44): n is 5-[N-(1-naphthylmethyl)carboxyamide]-2'-deoxyuridine
  misc_feature (47)..(47): n is 1,3-propane diol
ccctccancagccgnncaagngcnngnaggannnaaanggaannggngga

SEQ ID NO: 636 - DNA, 50 bp, Artificial Sequence
  Synthetic
  misc_feature (8)..(8): n is 5-[N-(1-naphthylmethyl)carboxyamide]-2'-deoxyuridine
  misc_feature (15)..(16): n is 5-[N-(1-naphthylmethyl)carboxyamide]-2'-deoxyuridine
  misc_feature (21)..(21): n is 5-[N-(1-naphthylmethyl)carboxyamide]-2'-deoxyuridine
  misc_feature (24)..(25): n is 5-[N-(1-naphthylmethyl)carboxyamide]-2'-deoxyuridine
  misc_feature (27)..(27): n is 5-[N-(1-naphthylmethyl)carboxyamide]-2'-deoxyuridine
  misc_feature (32)..(34): n is 5-[N-(1-naphthylmethyl)carboxyamide]-2'-deoxyuridine
  misc_feature (38)..(38): n is 5-[N-(1-naphthylmethyl)carboxyamide]-2'-deoxyuridine
  misc_feature (43)..(44): n is 5-[N-(1-naphthylmethyl)carboxyamide]-2'-deoxyuridine
  misc_feature (48)..(48): n is 1,3-propane diol
ccctccancagccgnncaagngcnngnaggannnaaanggaanngganga

SEQ ID NO: 637 - DNA, 50 bp, Artificial Sequence
  Synthetic
  misc_feature (8)..(8): n is 5-[N-(1-naphthylmethyl)carboxyamide]-2'-deoxyuridine
  misc_feature (15)..(16): n is 5-[N-(1-naphthylmethyl)carboxyamide]-2'-deoxyuridine
  misc_feature (21)..(21): n is 5-[N-(1-naphthylmethyl)carboxyamide]-2'-deoxyuridine
  misc_feature (24)..(25): n is 5-[N-(1-naphthylmethyl)carboxyamide]-2'-deoxyuridine
  misc_feature (27)..(27): n is 5-[N-(1-naphthylmethyl)carboxyamide]-2'-deoxyuridine
  misc_feature (32)..(34): n is 5-[N-(1-naphthylmethyl)carboxyamide]-2'-deoxyuridine
  misc_feature (38)..(38): n is 5-[N-(1-naphthylmethyl)carboxyamide]-2'-deoxyuridine
  misc_feature (43)..(44): n is 5-[N-(1-naphthylmethyl)carboxyamide]-2'-deoxyuridine
  misc_feature (49)..(49): n is 1,3-propane diol
ccctccancagccgnncaagngcnngnaggannnaaanggaannggagna

SEQ ID NO: 638 - DNA, 50 bp, Artificial Sequence
  Synthetic
  misc_feature (8)..(8): n is 5-[N-(1-naphthylmethyl)carboxyamide]-2'-deoxyuridine
  misc_feature (15)..(16): n is 5-[N-(1-naphthylmethyl)carboxyamide]-2'-deoxyuridine
  misc_feature (21)..(21): n is 5-[N-(1-naphthylmethyl)carboxyamide]-2'-deoxyuridine
  misc_feature (24)..(25): n is 5-[N-(1-naphthylmethyl)carboxyamide]-2'-deoxyuridine
  misc_feature (27)..(27): n is 5-[N-(1-naphthylmethyl)carboxyamide]-2'-deoxyuridine
  misc_feature (32)..(34): n is 5-[N-(1-naphthylmethyl)carboxyamide]-2'-deoxyuridine
  misc_feature (38)..(38): n is 5-[N-(1-naphthylmethyl)carboxyamide]-2'-deoxyuridine
  misc_feature (43)..(44): n is 5-[N-(1-naphthylmethyl)carboxyamide]-2'-deoxyuridine
  misc_feature (50)..(50): n is 1,3-propane diol
ccctccancagccgnncaagngcnngnaggannnaaanggaannggaggn

SEQ ID NO: 639 - DNA, 32 bp, Artificial Sequence
  Synthetic
  misc_feature (1)..(1): n is 2'-O-methyl-adenosine
  misc_feature (6)..(7): n is 5-[N-(1-naphthylmethyl)carboxyamide]-2'-deoxyuridine
  misc_feature (12)..(12): n is 5-[N-(1-naphthylmethyl)carboxyamide]-2'-deoxyuridine
  misc_feature (15)..(16): n is 5-[N-(1-naphthylmethyl)carboxyamide]-2'-deoxyuridine
  misc_feature (18)..(18): n is 5-[N-(1-naphthylmethyl)carboxyamide]-2'-deoxyuridine
  misc_feature (23)..(25): n is 5-[N-(1-naphthylmethyl)carboxyamide]-2'-deoxyuridine
  misc_feature (29)..(29): n is 5-[N-(1-naphthylmethyl)carboxyamide]-2'-deoxyuridine
ngccgnncaagngcnngnaggannnaaangga

SEQ ID NO: 640 - DNA, 32 bp, Artificial Sequence
  Synthetic
  misc_feature (2)..(2): n is 2'-O-methyl-guanosine
  misc_feature (6)..(7): n is 5-[N-(1-naphthylmethyl)carboxyamide]-2'-deoxyuridine
  misc_feature (12)..(12): n is 5-[N-(1-naphthylmethyl)carboxyamide]-2'-deoxyuridine
  misc_feature (15)..(16): n is 5-[N-(1-naphthylmethyl)carboxyamide]-2'-deoxyuridine
  misc_feature (18)..(18): n is 5-[N-(1-naphthylmethyl)carboxyamide]-2'-deoxyuridine
  misc_feature (23)..(25): n is 5-[N-(1-naphthylmethyl)carboxyamide]-2'-deoxyuridine
  misc_feature (29)..(29): n is 5-[N-(1-naphthylmethyl)carboxyamide]-2'-deoxyuridine
anccgnncaagngcnngnaggannnaaangga

SEQ ID NO: 641 - DNA, 32 bp, Artificial Sequence
  Synthetic
  misc_feature (3)..(3): n is 2'-O-methyl-cytidine
  misc_feature (6)..(7): n is 5-[N-(1-naphthylmethyl)carboxyamide]-2'-deoxyuridine
  misc_feature (12)..(12): n is 5-[N-(1-naphthylmethyl)carboxyamide]-2'-deoxyuridine
  misc_feature (15)..(16): n is 5-[N-(1-naphthylmethyl)carboxyamide]-2'-deoxyuridine
  misc_feature (18)..(18): n is 5-[N-(1-naphthylmethyl)carboxyamide]-2'-deoxyuridine
  misc_feature (23)..(25): n is 5-[N-(1-naphthylmethyl)carboxyamide]-2'-deoxyuridine
  misc_feature (29)..(29): n is 5-[N-(1-naphthylmethyl)carboxyamide]-2'-deoxyuridine
agncgnncaagngcnngnaggannnaaangga

SEQ ID NO: 642 - DNA, 32 bp, Artificial Sequence
  Synthetic
  misc_feature (4)..(4): n is 2'-O-methyl-cytidine
  misc_feature (6)..(7): n is 5-[N-(1-naphthylmethyl)carboxyamide]-2'-deoxyuridine
  misc_feature (12)..(12): n is 5-[N-(1-naphthylmethyl)carboxyamide]-2'-deoxyuridine
  misc_feature (15)..(16): n is 5-[N-(1-naphthylmethyl)carboxyamide]-2'-deoxyuridine
  misc_feature (18)..(18): n is 5-[N-(1-naphthylmethyl)carboxyamide]-2'-deoxyuridine
  misc_feature (23)..(25): n is 5-[N-(1-naphthylmethyl)carboxyamide]-2'-deoxyuridine
  misc_feature (29)..(29): n is 5-[N-(1-naphthylmethyl)carboxyamide]-2'-deoxyuridine
agcngnncaagngcnngnaggannnaaangga

SEQ ID NO: 643 - DNA, 32 bp, Artificial Sequence
  Synthetic
  misc_feature (5)..(5): n is 2'-O-methyl-guanosine
  misc_feature (6)..(7): n is 5-[N-(1-naphthylmethyl)carboxyamide]-2'-deoxyuridine
  misc_feature (12)..(12): n is 5-[N-(1-naphthylmethyl)carboxyamide]-2'-deoxyuridine
  misc_feature (15)..(16): n is 5-[N-(1-naphthylmethyl)carboxyamide]-2'-deoxyuridine
  misc_feature (18)..(18): n is 5-[N-(1-naphthylmethyl)carboxyamide]-2'-deoxyuridine
  misc_feature (23)..(25): n is 5-[N-(1-naphthylmethyl)carboxyamide]-2'-deoxyuridine
  misc_feature (29)..(29): n is 5-[N-(1-naphthylmethyl)carboxyamide]-2'-deoxyuridine
agccnnncaagngcnngnaggannnaaangga

SEQ ID NO: 644 - DNA, 32 bp, Artificial Sequence; identical to SEQ ID NO: 567
  Synthetic
  misc_feature (6)..(6): n is 2'-O-methyl-uridine
  misc_feature (7)..(7): n is 5-[N-(1-naphthylmethyl)carboxyamide]-2'-deoxyuridine
  misc_feature (12)..(12): n is 5-[N-(1-naphthylmethyl)carboxyamide]-2'-deoxyuridine
  misc_feature (15)..(16): n is 5-[N-(1-naphthylmethyl)carboxyamide]-2'-deoxyuridine
  misc_feature (18)..(18): n is 5-[N-(1-naphthylmethyl)carboxyamide]-2'-deoxyuridine
  misc_feature (23)..(25): n is 5-[N-(1-naphthylmethyl)carboxyamide]-2'-deoxyuridine
  misc_feature (29)..(29): n is 5-[N-(1-naphthylmethyl)carboxyamide]-2'-deoxyuridine

SEQ ID NO: 645 - DNA, 32 bp, Artificial Sequence; identical to SEQ ID NO: 567
  Synthetic
  misc_feature (6)..(6): n is 5-[N-(1-naphthylmethyl)carboxyamide]-2'-deoxyuridine
  misc_feature (7)..(7): n is 2'-O-methyl-uridine
  misc_feature (12)..(12): n is 5-[N-(1-naphthylmethyl)carboxyamide]-2'-deoxyuridine
  misc_feature (15)..(16): n is 5-[N-(1-naphthylmethyl)carboxyamide]-2'-deoxyuridine
  misc_feature (18)..(18): n is 5-[N-(1-naphthylmethyl)carboxyamide]-2'-deoxyuridine
  misc_feature (23)..(25): n is 5-[N-(1-naphthylmethyl)carboxyamide]-2'-deoxyuridine
  misc_feature (29)..(29): n is 5-[N-(1-naphthylmethyl)carboxyamide]-2'-deoxyuridine

SEQ ID NO: 646 - DNA, 32 bp, Artificial Sequence
  Synthetic
  misc_feature (6)..(7): n is 5-[N-(1-naphthylmethyl)carboxyamide]-2'-deoxyuridine
  misc_feature (8)..(8): n is 2'-O-methyl-cytidine
  misc_feature (12)..(12): n is 5-[N-(1-naphthylmethyl)carboxyamide]-2'-deoxyuridine
  misc_feature (15)..(16): n is 5-[N-(1-naphthylmethyl)carboxyamide]-2'-deoxyuridine
  misc_feature (18)..(18): n is 5-[N-(1-naphthylmethyl)carboxyamide]-2'-deoxyuridine
  misc_feature (23)..(25): n is 5-[N-(1-naphthylmethyl)carboxyamide]-2'-deoxyuridine
  misc_feature (29)..(29): n is 5-[N-(1-naphthylmethyl)carboxyamide]-2'-deoxyuridine
agccgnnnaagngcnngnaggannnaaangga

SEQ ID NO: 647 - DNA, 32 bp, Artificial Sequence
  Synthetic
  misc_feature (6)..(7): n is 5-[N-(1-naphthylmethyl)carboxyamide]-2'-deoxyuridine
  misc_feature (9)..(9): n is 2'-O-methyl-adenosine
  misc_feature (12)..(12): n is 5-[N-(1-naphthylmethyl)carboxyamide]-2'-deoxyuridine
  misc_feature (15)..(16): n is 5-[N-(1-naphthylmethyl)carboxyamide]-2'-deoxyuridine
  misc_feature (18)..(18): n is 5-[N-(1-naphthylmethyl)carboxyamide]-2'-deoxyuridine
  misc_feature (23)..(25): n is 5-[N-(1-naphthylmethyl)carboxyamide]-2'-deoxyuridine
  misc_feature (29)..(29): n is 5-[N-(1-naphthylmethyl)carboxyamide]-2'-deoxyuridine
agccgnncnagngcnngnaggannnaaangga

SEQ ID NO: 648 - DNA, 32 bp, Artificial Sequence
  Synthetic
  misc_feature (6)..(7): n is 5-[N-(1-naphthylmethyl)carboxyamide]-2'-deoxyuridine
  misc_feature (10)..(10): n is 2'-O-methyl-adenosine
  misc_feature (12)..(12): n is 5-[N-(1-naphthylmethyl)carboxyamide]-2'-deoxyuridine
  misc_feature (15)..(16): n is 5-[N-(1-naphthylmethyl)carboxyamide]-2'-deoxyuridine
  misc_feature (18)..(18): n is 5-[N-(1-naphthylmethyl)carboxyamide]-2'-deoxyuridine
  misc_feature (23)..(25): n is 5-[N-(1-naphthylmethyl)carboxyamide]-2'-deoxyuridine
  misc_feature (29)..(29): n is 5-[N-(1-naphthylmethyl)carboxyamide]-2'-deoxyuridine
agccgnncangngcnngnaggannnaaangga

SEQ ID NO: 649 - DNA, 32 bp, Artificial Sequence
  Synthetic
  misc_feature (6)..(7): n is 5-[N-(1-naphthylmethyl)carboxyamide]-2'-deoxyuridine
  misc_feature (11)..(11): n is 2'-O-methyl-guanosine
  misc_feature (12)..(12): n is 5-[N-(1-naphthylmethyl)carboxyamide]-2'-deoxyuridine
  misc_feature (15)..(16): n is 5-[N-(1-naphthylmethyl)carboxyamide]-2'-deoxyuridine
  misc_feature (18)..(18): n is 5-[N-(1-naphthylmethyl)carboxyamide]-2'-deoxyuridine
  misc_feature (23)..(25): n is 5-[N-(1-naphthylmethyl)carboxyamide]-2'-deoxyuridine
  misc_feature (29)..(29): n is 5-[N-(1-naphthylmethyl)carboxyamide]-2'-deoxyuridine
agccgnncaanngcnngnaggannnaaangga

SEQ ID NO: 650 - DNA, 32 bp, Artificial Sequence; identical to SEQ ID NO: 567
  Synthetic
  misc_feature (6)..(7): n is 5-[N-(1-naphthylmethyl)carboxyamide]-2'-deoxyuridine
  misc_feature (12)..(12): n is 2'-O-methyl-uridine
  misc_feature (15)..(16): n is 5-[N-(1-naphthylmethyl)carboxyamide]-2'-deoxyuridine
  misc_feature (18)..(18): n is 5-[N-(1-naphthylmethyl)carboxyamide]-2'-deoxyuridine
  misc_feature (23)..(25): n is 5-[N-(1-naphthylmethyl)carboxyamide]-2'-deoxyuridine
  misc_feature (29)..(29): n is 5-[N-(1-naphthylmethyl)carboxyamide]-2'-deoxyuridine

SEQ ID NO: 651 - DNA, 32 bp, Artificial Sequence
  Synthetic
  misc_feature (6)..(7): n is 5-[N-(1-naphthylmethyl)carboxyamide]-2'-deoxyuridine
  misc_feature (12)..(12): n is 5-[N-(1-naphthylmethyl)carboxyamide]-2'-deoxyuridine
  misc_feature (13)..(13): n is 2'-O-methyl-guanosine
  misc_feature (15)..(16): n is 5-[N-(1-naphthylmethyl)carboxyamide]-2'-deoxyuridine
  misc_feature (18)..(18): n is 5-[N-(1-naphthylmethyl)carboxyamide]-2'-deoxyuridine
  misc_feature (23)..(25): n is 5-[N-(1-naphthylmethyl)carboxyamide]-2'-deoxyuridine
  misc_feature (29)..(29): n is 5-[N-(1-naphthylmethyl)carboxyamide]-2'-deoxyuridine
agccgnncaagnncnngnaggannnaaangga

SEQ ID NO: 652 - DNA, 32 bp, Artificial Sequence
  Synthetic
  misc_feature (6)..(7): n is 5-[N-(1-naphthylmethyl)carboxyamide]-2'-deoxyuridine
  misc_feature (12)..(12): n is 5-[N-(1-naphthylmethyl)carboxyamide]-2'-deoxyuridine
  misc_feature (14)..(14): n is 2'-O-methyl-cytidine
  misc_feature (15)..(16): n is 5-[N-(1-naphthylmethyl)carboxyamide]-2'-deoxyuridine
  misc_feature (18)..(18): n is 5-[N-(1-naphthylmethyl)carboxyamide]-2'-deoxyuridine
  misc_feature (23)..(25): n is 5-[N-(1-naphthylmethyl)carboxyamide]-2'-deoxyuridine
  misc_feature (29)..(29): n is 5-[N-(1-naphthylmethyl)carboxyamide]-2'-deoxyuridine
agccgnncaagngnnngnaggannnaaangga

SEQ ID NO: 653 - DNA, 32 bp, Artificial Sequence; identical to SEQ ID NO: 567
  Synthetic
  misc_feature (6)..(7): n is 5-[N-(1-naphthylmethyl)carboxyamide]-2'-deoxyuridine
  misc_feature (12)..(12): n is 5-[N-(1-naphthylmethyl)carboxyamide]-2'-deoxyuridine
  misc_feature (15)..(15): n is 2'-O-methyl-uridine
  misc_feature (16)..(16): n is 5-[N-(1-naphthylmethyl)carboxyamide]-2'-deoxyuridine
  misc_feature (18)..(18): n is 5-[N-(1-naphthylmethyl)carboxyamide]-2'-deoxyuridine
  misc_feature (23)..(25): n is 5-[N-(1-naphthylmethyl)carboxyamide]-2'-deoxyuridine
  misc_feature (29)..(29): n is 5-[N-(1-naphthylmethyl)carboxyamide]-2'-deoxyuridine

SEQ ID NO: 654 - DNA, 32 bp, Artificial Sequence; identical to SEQ ID NO: 567
  Synthetic
  misc_feature (6)..(7): n is 5-[N-(1-naphthylmethyl)carboxyamide]-2'-deoxyuridine
  misc_feature (12)..(12): n is 5-[N-(1-naphthylmethyl)carboxyamide]-2'-deoxyuridine
  misc_feature (15)..(15): n is 5-[N-(1-naphthylmethyl)carboxyamide]-2'-deoxyuridine
  misc_feature (16)..(16): n is 2'-O-methyl-uridine
  misc_feature (18)..(18): n is 5-[N-(1-naphthylmethyl)carboxyamide]-2'-deoxyuridine
  misc_feature (23)..(25): n is 5-[N-(1-naphthylmethyl)carboxyamide]-2'-deoxyuridine
  misc_feature (29)..(29): n is 5-[N-(1-naphthylmethyl)carboxyamide]-2'-deoxyuridine

SEQ ID NO: 655 - DNA, 32 bp, Artificial Sequence
  Synthetic
  misc_feature (6)..(7): n is 5-[N-(1-naphthylmethyl)carboxyamide]-2'-deoxyuridine
  misc_feature (12)..(12): n is 5-[N-(1-naphthylmethyl)carboxyamide]-2'-deoxyuridine
  misc_feature (15)..(16): n is 5-[N-(1-naphthylmethyl)carboxyamide]-2'-deoxyuridine
  misc_feature (17)..(17): n is 2'-O-methyl-guanosine
  misc_feature (18)..(18): n is 5-[N-(1-naphthylmethyl)carboxyamide]-2'-deoxyuridine
  misc_feature (23)..(25): n is 5-[N-(1-naphthylmethyl)carboxyamide]-2'-deoxyuridine
  misc_feature (29)..(29): n is 5-[N-(1-naphthylmethyl)carboxyamide]-2'-deoxyuridine
agccgnncaagngcnnnnaggannnaaangga

SEQ ID NO: 656 - DNA, 32 bp, Artificial Sequence; identical to SEQ ID NO: 567
  Synthetic
  misc_feature (6)..(7): n is 5-[N-(1-naphthylmethyl)carboxyamide]-2'-deoxyuridine
  misc_feature (12)..(12): n is 5-[N-(1-naphthylmethyl)carboxyamide]-2'-deoxyuridine
  misc_feature (15)..(16): n is 5-[N-(1-naphthylmethyl)carboxyamide]-2'-deoxyuridine
  misc_feature (18)..(18): n is 2'-O-methyl-uridine
  misc_feature (23)..(25): n is 5-[N-(1-naphthylmethyl)carboxyamide]-2'-deoxyuridine
  misc_feature (29)..(29): n is 5-[N-(1-naphthylmethyl)carboxyamide]-2'-deoxyuridine

SEQ ID NO: 657 - DNA, 32 bp, Artificial Sequence
  Synthetic
  misc_feature (6)..(7): n is 5-[N-(1-naphthylmethyl)carboxyamide]-2'-deoxyuridine
  misc_feature (12)..(12): n is 5-[N-(1-naphthylmethyl)carboxyamide]-2'-deoxyuridine
  misc_feature (15)..(16): n is 5-[N-(1-naphthylmethyl)carboxyamide]-2'-deoxyuridine
  misc_feature (18)..(18): n is 5-[N-(1-naphthylmethyl)carboxyamide]-2'-deoxyuridine
  misc_feature (19)..(19): n is 2'-O-methyl-adenosine
  misc_feature (23)..(25): n is 5-[N-(1-naphthylmethyl)carboxyamide]-2'-deoxyuridine
  misc_feature (29)..(29): n is 5-[N-(1-naphthylmethyl)carboxyamide]-2'-deoxyuridine
agccgnncaagngcnngnnggannnaaangga

SEQ ID NO: 658 - DNA, 32 bp, Artificial Sequence
  Synthetic
  misc_feature (6)..(7): n is 5-[N-(1-naphthylmethyl)carboxyamide]-2'-deoxyuridine
  misc_feature (12)..(12): n is 5-[N-(1-naphthylmethyl)carboxyamide]-2'-deoxyuridine
  misc_feature (15)..(16): n is 5-[N-(1-naphthylmethyl)carboxyamide]-2'-deoxyuridine
  misc_feature (18)..(18): n is 5-[N-(1-naphthylmethyl)carboxyamide]-2'-deoxyuridine
  misc_feature (20)..(20): n is 2'-O-methyl-guanosine
  misc_feature (23)..(25): n is 5-[N-(1-naphthylmethyl)carboxyamide]-2'-deoxyuridine
  misc_feature (29)..(29): n is 5-[N-(1-naphthylmethyl)carboxyamide]-2'-deoxyuridine
agccgnncaagngcnngnangannnaaangga

SEQ ID NO: 659 - DNA, 32 bp, Artificial Sequence
  Synthetic
  misc_feature (6)..(7): n is 5-[N-(1-naphthylmethyl)carboxyamide]-2'-deoxyuridine
  misc_feature (12)..(12): n is 5-[N-(1-naphthylmethyl)carboxyamide]-2'-deoxyuridine
  misc_feature (15)..(16): n is 5-[N-(1-naphthylmethyl)carboxyamide]-2'-deoxyuridine
  misc_feature (18)..(18): n is 5-[N-(1-naphthylmethyl)carboxyamide]-2'-deoxyuridine
  misc_feature (21)..(21): n is 2'-O-methyl-guanosine
  misc_feature (23)..(25): n is 5-[N-(1-naphthylmethyl)carboxyamide]-2'-deoxyuridine
  misc_feature (29)..(29): n is 5-[N-(1-naphthylmethyl)carboxyamide]-2'-deoxyuridine
agccgnncaagngcnngnagnannnaaangga

SEQ ID NO: 660 - DNA, 32 bp, Artificial Sequence
  Synthetic
  misc_feature (6)..(7): n is 5-[N-(1-naphthylmethyl)carboxyamide]-2'-deoxyuridine
  misc_feature (12)..(12): n is 5-[N-(1-naphthylmethyl)carboxyamide]-2'-deoxyuridine
  misc_feature (15)..(16): n is 5-[N-(1-naphthylmethyl)carboxyamide]-2'-deoxyuridine
  misc_feature (18)..(18): n is 5-[N-(1-naphthylmethyl)carboxyamide]-2'-deoxyuridine
  misc_feature (22)..(22): n is 2'-O-methyl-adenosine
  misc_feature (23)..(25): n is 5-[N-(1-naphthylmethyl)carboxyamide]-2'-deoxyuridine
  misc_feature (29)..(29): n is 5-[N-(1-naphthylmethyl)carboxyamide]-2'-deoxyuridine
agccgnncaagngcnngnaggnnnnaaangga

SEQ ID NO: 661 - DNA, 32 bp, Artificial Sequence; identical to SEQ ID NO: 567
  Synthetic
  misc_feature (6)..(7): n is 5-[N-(1-naphthylmethyl)carboxyamide]-2'-deoxyuridine
  misc_feature (12)..(12): n is 5-[N-(1-naphthylmethyl)carboxyamide]-2'-deoxyuridine
  misc_feature (15)..(16): n is 5-[N-(1-naphthylmethyl)carboxyamide]-2'-deoxyuridine
  misc_feature (18)..(18): n is 5-[N-(1-naphthylmethyl)carboxyamide]-2'-deoxyuridine
  misc_feature (23)..(23): n is 2'-O-methyl-uridine
  misc_feature (24)..(25): n is 5-[N-(1-naphthylmethyl)carboxyamide]-2'-deoxyuridine
  misc_feature (29)..(29): n is 5-[N-(1-naphthylmethyl)carboxyamide]-2'-deoxyuridine

SEQ ID NO: 662 - DNA, 32 bp, Artificial Sequence; identical to SEQ ID NO: 567
  Synthetic
  misc_feature (6)..(7): n is 5-[N-(1-naphthylmethyl)carboxyamide]-2'-deoxyuridine
  misc_feature (12)..(12): n is 5-[N-(1-naphthylmethyl)carboxyamide]-2'-deoxyuridine
  misc_feature (15)..(16): n is 5-[N-(1-naphthylmethyl)carboxyamide]-2'-deoxyuridine
  misc_feature (18)..(18): n is 5-[N-(1-naphthylmethyl)carboxyamide]-2'-deoxyuridine
  misc_feature (23)..(23): n is 5-[N-(1-naphthylmethyl)carboxyamide]-2'-deoxyuridine
  misc_feature (24)..(24): n is 2'-O-methyl-uridine
  misc_feature (25)..(25): n is 5-[N-(1-naphthylmethyl)carboxyamide]-2'-deoxyuridine
  misc_feature (29)..(29): n is 5-[N-(1-naphthylmethyl)carboxyamide]-2'-deoxyuridine

SEQ ID NO: 663 - DNA, 32 bp, Artificial Sequence; identical to SEQ ID NO: 567
  Synthetic
  misc_feature (6)..(7): n is 5-[N-(1-naphthylmethyl)carboxyamide]-2'-deoxyuridine
  misc_feature (12)..(12): n is 5-[N-(1-naphthylmethyl)carboxyamide]-2'-deoxyuridine
  misc_feature (15)..(16): n is 5-[N-(1-naphthylmethyl)carboxyamide]-2'-deoxyuridine
  misc_feature (18)..(18): n is 5-[N-(1-naphthylmethyl)carboxyamide]-2'-deoxyuridine
  misc_feature (23)..(24): n is 5-[N-(1-naphthylmethyl)carboxyamide]-2'-deoxyuridine
  misc_feature (25)..(25): n is 2'-O-methyl-uridine
  misc_feature (29)..(29): n is 5-[N-(1-naphthylmethyl)carboxyamide]-2'-deoxyuridine

SEQ ID NO: 664 - DNA, 32 bp, Artificial Sequence
  Synthetic
  misc_feature (6)..(7): n is 5-[N-(1-naphthylmethyl)carboxyamide]-2'-deoxyuridine
  misc_feature (12)..(12): n is 5-[N-(1-naphthylmethyl)carboxyamide]-2'-deoxyuridine
  misc_feature (15)..(16): n is 5-[N-(1-naphthylmethyl)carboxyamide]-2'-deoxyuridine
  misc_feature (18)..(18): n is 5-[N-(1-naphthylmethyl)carboxyamide]-2'-deoxyuridine
  misc_feature (23)..(25): n is 5-[N-(1-naphthylmethyl)carboxyamide]-2'-deoxyuridine
  misc_feature (26)..(26): n is 2'-O-methyl-adenosine
  misc_feature (29)..(29): n is 5-[N-(1-naphthylmethyl)carboxyamide]-2'-deoxyuridine
agccgnncaagngcnngnaggannnnaangga

SEQ ID NO: 665 - DNA, 32 bp, Artificial Sequence
  Synthetic
  misc_feature (6)..(7): n is 5-[N-(1-naphthylmethyl)carboxyamide]-2'-deoxyuridine
  misc_feature (12)..(12): n is 5-[N-(1-naphthylmethyl)carboxyamide]-2'-deoxyuridine
  misc_feature (15)..(16): n is 5-[N-(1-naphthylmethyl)carboxyamide]-2'-deoxyuridine
  misc_feature (18)..(18): n is 5-[N-(1-naphthylmethyl)carboxyamide]-2'-deoxyuridine
  misc_feature (23)..(25): n is 5-[N-(1-naphthylmethyl)carboxyamide]-2'-deoxyuridine
  misc_feature (27)..(27): n is 2'-O-methyl-adenosine
  misc_feature (29)..(29): n is 5-[N-(1-naphthylmethyl)carboxyamide]-2'-deoxyuridine
agccgnncaagngcnngnaggannnanangga

SEQ ID NO: 666 - DNA, 32 bp, Artificial Sequence
  Synthetic
  misc_feature (6)..(7): n is 5-[N-(1-naphthylmethyl)carboxyamide]-2'-deoxyuridine
  misc_feature (12)..(12): n is 5-[N-(1-naphthylmethyl)carboxyamide]-2'-deoxyuridine
  misc_feature (15)..(16): n is 5-[N-(1-naphthylmethyl)carboxyamide]-2'-deoxyuridine
  misc_feature (18)..(18): n is 5-[N-(1-naphthylmethyl)carboxyamide]-2'-deoxyuridine
  misc_feature (23)..(25): n is 5-[N-(1-naphthylmethyl)carboxyamide]-2'-deoxyuridine
  misc_feature (28)..(28): n is 2'-O-methyl-adenosine
  misc_feature (29)..(29): n is 5-[N-(1-naphthylmethyl)carboxyamide]-2'-deoxyuridine
agccgnncaagngcnngnaggannnaanngga

SEQ ID NO: 667 - DNA, 32 bp, Artificial Sequence; identical to SEQ ID NO: 567
  Synthetic
  misc_feature (6)..(7): n is 5-[N-(1-naphthylmethyl)carboxyamide]-2'-deoxyuridine
  misc_feature (12)..(12): n is 5-[N-(1-naphthylmethyl)carboxyamide]-2'-deoxyuridine
  misc_feature (15)..(16): n is 5-[N-(1-naphthylmethyl)carboxyamide]-2'-deoxyuridine
  misc_feature (18)..(18): n is 5-[N-(1-naphthylmethyl)carboxyamide]-2'-deoxyuridine
  misc_feature (23)..(25): n is 5-[N-(1-naphthylmethyl)carboxyamide]-2'-deoxyuridine
  misc_feature (29)..(29): n is 2'-O-methyl-uridine

SEQ ID NO: 668 - DNA, 32 bp, Artificial Sequence
  Synthetic
  misc_feature (6)..(7): n is 5-[N-(1-naphthylmethyl)carboxyamide]-2'-deoxyuridine
  misc_feature (12)..(12): n is 5-[N-(1-naphthylmethyl)carboxyamide]-2'-deoxyuridine
  misc_feature (15)..(16): n is 5-[N-(1-naphthylmethyl)carboxyamide]-2'-deoxyuridine
  misc_feature (18)..(18): n is 5-[N-(1-naphthylmethyl)carboxyamide]-2'-deoxyuridine
  misc_feature (23)..(25): n is 5-[N-(1-naphthylmethyl)carboxyamide]-2'-deoxyuridine
  misc_feature (29)..(29): n is 5-[N-(1-naphthylmethyl)carboxyamide]-2'-deoxyuridine
  misc_feature (30)..(30): n is 2'-O-methyl-guanosine
agccgnncaagngcnngnaggannnaaannga

SEQ ID NO: 669 - DNA, 32 bp, Artificial Sequence
  Synthetic
  misc_feature (6)..(7): n is 5-[N-(1-naphthylmethyl)carboxyamide]-2'-deoxyuridine
  misc_feature (12)..(12): n is 5-[N-(1-naphthylmethyl)carboxyamide]-2'-deoxyuridine
  misc_feature (15)..(16): n is 5-[N-(1-naphthylmethyl)carboxyamide]-2'-deoxyuridine
  misc_feature (18)..(18): n is 5-[N-(1-naphthylmethyl)carboxyamide]-2'-deoxyuridine
  misc_feature (23)..(25): n is 5-[N-(1-naphthylmethyl)carboxyamide]-2'-deoxyuridine
  misc_feature (29)..(29): n is 5-[N-(1-naphthylmethyl)carboxyamide]-2'-deoxyuridine
  misc_feature (31)..(31): n is 2'-O-methyl-guanosine
agccgnncaagngcnngnaggannnaaangna

SEQ ID NO: 670 - DNA, 32 bp, Artificial Sequence
  Synthetic
  misc_feature (6)..(7): n is 5-[N-(1-naphthylmethyl)carboxyamide]-2'-deoxyuridine
  misc_feature (12)..(12): n is 5-[N-(1-naphthylmethyl)carboxyamide]-2'-deoxyuridine
  misc_feature (15)..(16): n is 5-[N-(1-naphthylmethyl)carboxyamide]-2'-deoxyuridine
  misc_feature (18)..(18): n is 5-[N-(1-naphthylmethyl)carboxyamide]-2'-deoxyuridine
  misc_feature (23)..(25): n is 5-[N-(1-naphthylmethyl)carboxyamide]-2'-deoxyuridine
  misc_feature (29)..(29): n is 5-[N-(1-naphthylmethyl)carboxyamide]-2'-deoxyuridine
  misc_feature (32)..(32): n is 2'-O-methyl-adenosine
agccgnncaagngcnngnaggannnaaanggn

SEQ ID NO: 671 - DNA, 32 bp, Artificial Sequence; identical to SEQ ID NO: 646
  Synthetic
  misc_feature (6)..(7): n is 5-[N-(1-naphthylmethyl)carboxyamide]-2'-deoxyuridine
  misc_feature (8)..(8): n is 1,3-propane diol
  misc_feature (12)..(12): n is 5-[N-(1-naphthylmethyl)carboxyamide]-2'-deoxyuridine
  misc_feature (15)..(16): n is 5-[N-(1-naphthylmethyl)carboxyamide]-2'-deoxyuridine
  misc_feature (18)..(18): n is 5-[N-(1-naphthylmethyl)carboxyamide]-2'-deoxyuridine
  misc_feature (23)..(25): n is 5-[N-(1-naphthylmethyl)carboxyamide]-2'-deoxyuridine
  misc_feature (29)..(29): n is 5-[N-(1-naphthylmethyl)carboxyamide]-2'-deoxyuridine

SEQ ID NO: 672 - DNA, 32 bp, Artificial Sequence; identical to SEQ ID NO: 655
  Synthetic
  misc_feature (6)..(7): n is 5-[N-(1-naphthylmethyl)carboxyamide]-2'-deoxyuridine
  misc_feature (12)..(12): n is 5-[N-(1-naphthylmethyl)carboxyamide]-2'-deoxyuridine
  misc_feature (15)..(16): n is 5-[N-(1-naphthylmethyl)carboxyamide]-2'-deoxyuridine
  misc_feature (17)..(17): n is 1,3-propane diol
  misc_feature (18)..(18): n is 5-[N-(1-naphthylmethyl)carboxyamide]-2'-deoxyuridine
  misc_feature (23)..(25): n is 5-[N-(1-naphthylmethyl)carboxyamide]-2'-deoxyuridine
  misc_feature (29)..(29): n is 5-[N-(1-naphthylmethyl)carboxyamide]-2'-deoxyuridine

SEQ ID NO: 673 - DNA, 32 bp, Artificial Sequence; identical to SEQ ID NO: 658
  Synthetic
  misc_feature (6)..(7): n is 5-[N-(1-naphthylmethyl)carboxyamide]-2'-deoxyuridine
  misc_feature (12)..(12): n is 5-[N-(1-naphthylmethyl)carboxyamide]-2'-deoxyuridine
  misc_feature (15)..(16): n is 5-[N-(1-naphthylmethyl)carboxyamide]-2'-deoxyuridine
  misc_feature (18)..(18): n is 5-[N-(1-naphthylmethyl)carboxyamide]-2'-deoxyuridine
  misc_feature (20)..(20): n is 1,3-propane diol
  misc_feature (23)..(25): n is 5-[N-(1-naphthylmethyl)carboxyamide]-2'-deoxyuridine
  misc_feature (29)..(29): n is 5-[N-(1-naphthylmethyl)carboxyamide]-2'-deoxyuridine

SEQ ID NO: 674 - DNA, 32 bp, Artificial Sequence
  Synthetic
  misc_feature (6)..(7): n is 5-[N-(1-naphthylmethyl)carboxyamide]-2'-deoxyuridine
  misc_feature (8)..(8): n is 1,3-propane diol
  misc_feature (12)..(12): n is 5-[N-(1-naphthylmethyl)carboxyamide]-2'-deoxyuridine
  misc_feature (15)..(16): n is 5-[N-(1-naphthylmethyl)carboxyamide]-2'-deoxyuridine
  misc_feature (17)..(17): n is 1,3-propane diol
  misc_feature (18)..(18): n is 5-[N-(1-naphthylmethyl)carboxyamide]-2'-deoxyuridine
  misc_feature (20)..(20): n is 1,3-propane diol
  misc_feature (23)..(25): n is 5-[N-(1-naphthylmethyl)carboxyamide]-2'-deoxyuridine
  misc_feature (29)..(29): n is 5-[N-(1-naphthylmethyl)carboxyamide]-2'-deoxyuridine
agccgnnnaagngcnnnnangannnaaangga

SEQ ID NO: 675 - DNA, 31 bp, Artificial Sequence
  Synthetic
  misc_feature (6)..(7): n is 5-[N-(1-naphthylmethyl)carboxyamide]-2'-deoxyuridine
  misc_feature (11)..(11): n is 5-[N-(1-naphthylmethyl)carboxyamide]-2'-deoxyuridine
  misc_feature (14)..(15): n is 5-[N-(1-naphthylmethyl)carboxyamide]-2'-deoxyuridine
  misc_feature (17)..(17): n is 5-[N-(1-naphthylmethyl)carboxyamide]-2'-deoxyuridine
  misc_feature (22)..(24): n is 5-[N-(1-naphthylmethyl)carboxyamide]-2'-deoxyuridine
  misc_feature (28)..(28): n is 5-[N-(1-naphthylmethyl)carboxyamide]-2'-deoxyuridine
agccgnnaagngcnngnaggannnaaangga

SEQ ID NO: 676 - DNA, 31 bp, Artificial Sequence
  Synthetic
  misc_feature (6)..(7): n is 5-[N-(1-naphthylmethyl)carboxyamide]-2'-deoxyuridine
  misc_feature (12)..(12): n is 5-[N-(1-naphthylmethyl)carboxyamide]-2'-deoxyuridine
  misc_feature (15)..(16): n is 5-[N-(1-naphthylmethyl)carboxyamide]-2'-deoxyuridine
  misc_feature (17)..(17): n is 5-[N-(1-naphthylmethyl)carboxyamide]-2'-deoxyuridine
  misc_feature (22)..(24): n is 5-[N-(1-naphthylmethyl)carboxyamide]-2'-deoxyuridine
  misc_feature (28)..(28): n is 5-[N-(1-naphthylmethyl)carboxyamide]-2'-deoxyuridine
agccgnncaagngcnnnaggannnaaangga

SEQ ID NO: 677 - DNA, 31 bp, Artificial Sequence
  Synthetic
  misc_feature (6)..(7): n is 5-[N-(1-naphthylmethyl)carboxyamide]-2'-deoxyuridine
  misc_feature (12)..(12): n is 5-[N-(1-naphthylmethyl)carboxyamide]-2'-deoxyuridine
  misc_feature (15)..(16): n is 5-[N-(1-naphthylmethyl)carboxyamide]-2'-deoxyuridine
  misc_feature (18)..(18): n is 5-[N-(1-naphthylmethyl)carboxyamide]-2'-deoxyuridine
  misc_feature (22)..(24): n is 5-[N-(1-naphthylmethyl)carboxyamide]-2'-deoxyuridine
  misc_feature (28)..(28): n is 5-[N-(1-naphthylmethyl)carboxyamide]-2'-deoxyuridine
agccgnncaagngcnngnagannnaaangga

SEQ ID NO: 678 - DNA, 30 bp, Artificial Sequence
  Synthetic
  misc_feature (4)..(5): n is 5-[N-(1-naphthylmethyl)carboxyamide]-2'-deoxyuridine
  misc_feature (10)..(10): n is 5-[N-(1-naphthylmethyl)carboxyamide]-2'-deoxyuridine
  misc_feature (13)..(14): n is 5-[N-(1-naphthylmethyl)carboxyamide]-2'-deoxyuridine
  misc_feature (16)..(16): n is 5-[N-(1-naphthylmethyl)carboxyamide]-2'-deoxyuridine
  misc_feature (21)..(23): n is 5-[N-(1-naphthylmethyl)carboxyamide]-2'-deoxyuridine
  misc_feature (27)..(27): n is 5-[N-(1-naphthylmethyl)carboxyamide]-2'-deoxyuridine
ccgnnaaagngcnngnaggannnaaangga

SEQ ID NO: 679 - DNA, 30 bp, Artificial Sequence
  Synthetic
  misc_feature (4)..(5): n is 5-[N-(1-naphthylmethyl)carboxyamide]-2'-deoxyuridine
  misc_feature (10)..(10): n is 5-[N-(1-naphthylmethyl)carboxyamide]-2'-deoxyuridine
  misc_feature (13)..(14): n is 5-[N-(1-naphthylmethyl)carboxyamide]-2'-deoxyuridine
  misc_feature (16)..(16): n is 5-[N-(1-naphthylmethyl)carboxyamide]-2'-deoxyuridine
  misc_feature (21)..(23): n is 5-[N-(1-naphthylmethyl)carboxyamide]-2'-deoxyuridine
  misc_feature (27)..(27): n is 5-[N-(1-naphthylmethyl)carboxyamide]-2'-deoxyuridine
ccgnngaagngcnngnaggannnaaangga

SEQ ID NO: 680 - DNA, 30 bp, Artificial Sequence
  Synthetic
  misc_feature (4)..(5): n is 5-[N-(1-naphthylmethyl)carboxyamide]-2'-deoxyuridine
  misc_feature (10)..(10): n is 5-[N-(1-naphthylmethyl)carboxyamide]-2'-deoxyuridine
  misc_feature (13)..(14): n is 5-[N-(1-naphthylmethyl)carboxyamide]-2'-deoxyuridine
  misc_feature (16)..(16): n is 5-[N-(1-naphthylmethyl)carboxyamide]-2'-deoxyuridine
  misc_feature (21)..(23): n is 5-[N-(1-naphthylmethyl)carboxyamide]-2'-deoxyuridine
  misc_feature (27)..(27): n is 5-[N-(1-naphthylmethyl)carboxyamide]-2'-deoxyuridine
ccgnntaagngcnngnaggannnaaangga

SEQ ID NO: 681 - DNA, 30 bp, Artificial Sequence
  Synthetic
  misc_feature (4)..(5): n is 5-[N-(1-nap[hthylmethyl)carboxyamide]-2'-deoxyuridine
  misc_feature (10)..(10): n is 5-[N-(1-nap[hthylmethyl)carboxyamide]-2'-deoxyuridine
  misc_feature (13)..(14): n is 5-[N-(1-nap[hthylmethyl)carboxyamide]-2'-deoxyuridine
  misc_feature (16)..(16): n is 5-[N-(1-nap[hthylmethyl)carboxyamide]-2'-deoxyuridine
  misc_feature (21)..(23): n is 5-[N-(1-nap[hthylmethyl)carboxyamide]-2'-deoxyuridine
  misc_feature (27)..(27): n is 5-[N-(1-nap[hthylmethyl)carboxyamide]-2'-deoxyuridine
ccgnncaagngcnnanaggannnaaangga

SEQ ID NO: 682 - DNA, 30 bp, Artificial Sequence
  Synthetic
  misc_feature (4)..(5): n is 5-[N-(1-naphthylmethyl)carboxyamide]-2'-deoxyuridine
  misc_feature (10)..(10): n is 5-[N-(1-naphthylmethyl)carboxyamide]-2'-deoxyuridine
  misc_feature (13)..(14): n is 5-[N-(1-naphthylmethyl)carboxyamide]-2'-deoxyuridine
  misc_feature (16)..(16): n is 5-[N-(1-naphthylmethyl)carboxyamide]-2'-deoxyuridine
  misc_feature (21)..(23): n is 5-[N-(1-naphthylmethyl)carboxyamide]-2'-deoxyuridine
  misc_feature (27)..(27): n is 5-[N-(1-naphthylmethyl)carboxyamide]-2'-deoxyuridine
ccgnncaagngcnncnaggannnaaangga

SEQ ID NO: 683 - DNA, 30 bp, Artificial Sequence
  Synthetic
  misc_feature (4)..(5): n is 5-[N-(1-naphthylmethyl)carboxyamide]-2'-deoxyuridine
  misc_feature (10)..(10): n is 5-[N-(1-naphthylmethyl)carboxyamide]-2'-deoxyuridine
  misc_feature (13)..(14): n is 5-[N-(1-naphthylmethyl)carboxyamide]-2'-deoxyuridine
  misc_feature (16)..(16): n is 5-[N-(1-naphthylmethyl)carboxyamide]-2'-deoxyuridine
  misc_feature (21)..(23): n is 5-[N-(1-naphthylmethyl)carboxyamide]-2'-deoxyuridine
  misc_feature (27)..(27): n is 5-[N-(1-naphthylmethyl)carboxyamide]-2'-deoxyuridine
ccgnncaagngcnntnaggannnaaangga

SEQ ID NO: 684 - DNA, 30 bp, Artificial Sequence
  Synthetic
  misc_feature (4)..(5): n is 5-[N-(1-naphthylmethyl)carboxyamide]-2'-deoxyuridine
  misc_feature (10)..(10): n is 5-[N-(1-naphthylmethyl)carboxyamide]-2'-deoxyuridine
  misc_feature (13)..(14): n is 5-[N-(1-naphthylmethyl)carboxyamide]-2'-deoxyuridine
  misc_feature (16)..(16): n is 5-[N-(1-naphthylmethyl)carboxyamide]-2'-deoxyuridine
  misc_feature (21)..(23): n is 5-[N-(1-naphthylmethyl)carboxyamide]-2'-deoxyuridine
  misc_feature (27)..(27): n is 5-[N-(1-naphthylmethyl)carboxyamide]-2'-deoxyuridine
ccgnncaagngcnngnaagannnaaangga

SEQ ID NO: 685 - DNA, 30 bp, Artificial Sequence
  Synthetic
  misc_feature (4)..(5): n is 5-[N-(1-naphthylmethyl)carboxyamid[e]-2'-deoxyuridine
  misc_feature (10)..(10): n is 5-[N-(1-naphthylmethyl)carboxyamid[e]-2'-deoxyuridine
  misc_feature (13)..(14): n is 5-[N-(1-naphthylmethyl)carboxyamid[e]-2'-deoxyuridine
  misc_feature (16)..(16): n is 5-[N-(1-naphthylmethyl)carboxyamid[e]-2'-deoxyuridine
  misc_feature (21)..(23): n is 5-[N-(1-naphthylmethyl)carboxyamid[e]-2'-deoxyuridine
  misc_feature (27)..(27): n is 5-[N-(1-naphthylmethyl)carboxyamid[e]-2'-deoxyuridine
ccgnncaagngcnngnacgannnaaangga

SEQ ID NO: 686 - DNA, 30 bp, Artificial Sequence
  Synthetic
  misc_feature (4)..(5): n is 5-[N-(1-naphthylmethyl)carboxyamide]-2'-deoxyuridine
  misc_feature (10)..(10): n is 5-[N-(1-naphthylmethyl)carboxyamide]-2'-deoxyuridine
  misc_feature (13)..(14): n is 5-[N-(1-naphthylmethyl)carboxyamide]-2'-deoxyuridine
  misc_feature (16)..(16): n is 5-[N-(1-naphthylmethyl)carboxyamide]-2'-deoxyuridine
  misc_feature (21)..(23): n is 5-[N-(1-naphthylmethyl)carboxyamide]-2'-deoxyuridine
  misc_feature (27)..(27): n is 5-[N-(1-naphthylmethyl)carboxyamide]-2'-deoxyuridine
ccgnncaagngcnngnatgannnaaangga

SEQ ID NO: 687 - DNA, 29 bp, Artificial Sequence
  Synthetic
  misc_feature (4)..(4): n is 5-[N-(1-naphthylmethyl)carboxyamide]-2'-O-methyl-uridine
  misc_feature (5)..(5): n is 5-[N-(1-naphthylmethyl)carboxyamide]-2'-deoxyuridine
  misc_feature (10)..(10): n is 5-[N-(1-naphthylmethyl)carboxyamide]-2'-deoxyuridine
  misc_feature (13)..(14): n is 5-[N-(1-naphthylmethyl)carboxyamide]-2'-deoxyuridine
  misc_feature (16)..(16): n is 5-[N-(1-naphthylmethyl)carboxyamide]-2'-deoxyuridine
  misc_feature (21)..(23): n is 5-[N-(1-naphthylmethyl)carboxyamide]-2'-deoxyuridine
  misc_feature (27)..(27): n is 5-[N-(1-naphthylmethyl)carboxyamide]-2'-deoxyuridine
ccgnncaagngcnngnaggannnaaangg

SEQ ID NO: 688 - DNA, 29 bp, Artificial Sequence
  Synthetic
  misc_feature (4)..(4): n is 5-[N-(1-naphthylmethyl)carboxyamide]-2'-deoxyuridine
  misc_feature (5)..(5): n is 5-[N-(1-naphthylmethyl)carboxyamide]-2'-O-methyl-uridine
  misc_feature (10)..(10): n is 5-[N-(1-naphthylmethyl)carboxyamide]-2'-deoxyuridine
  misc_feature (13)..(14): n is 5-[N-(1-naphthylmethyl)carboxyamide]-2'-deoxyuridine
  misc_feature (16)..(16): n is 5-[N-(1-naphthylmethyl)carboxyamide]-2'-deoxyuridine
  misc_feature (21)..(23): n is 5-[N-(1-naphthylmethyl)carboxyamide]-2'-deoxyuridine
  misc_feature (27)..(27): n is 5-[N-(1-naphthylmethyl)carboxyamide]-2'-deoxyuridine
ccgnncaagngcnngnaggannnaaangg

SEQ ID NO: 689 - DNA, 29 bp, Artificial Sequence
  Synthetic
  misc_feature (4)..(5): n is 5-[N-(1-naphthylmethyl)carboxyamide]-2'-deoxyuridine
  misc_feature (10)..(10): n is 5-[N-(1-naphthylmethyl)carboxyamide]-2'-O-methyl-uridine
  misc_feature (13)..(14): n is 5-[N-(1-naphthylmethyl)carboxyamide]-2'-deoxyuridine
  misc_feature (16)..(16): n is 5-[N-(1-naphthylmethyl)carboxyamide]-2'-deoxyuridine
  misc_feature (21)..(23): n is 5-[N-(1-naphthylmethyl)carboxyamide]-2'-deoxyuridine
  misc_feature (27)..(27): n is 5-[N-(1-naphthylmethyl)carboxyamide]-2'-deoxyuridine
ccgnncaagngcnngnaggannnaaangg

SEQ ID NO: 690 - DNA, 29 bp, Artificial Sequence
  Synthetic
  misc_feature (4)..(5): n is 5-[N-(1-naphthylmethyl)carboxyamide]-2'-deoxyuridine
  misc_feature (10)..(10): n is 5-[N-(1-naphthylmethyl)carboxyamide]-2'-deoxyuridine
  misc_feature (13)..(13): n is 5-[N-(1-naphthylmethyl)carboxyamide]-2'-O-methyl-uridine
  misc_feature (14)..(14): n is 5-[N-(1-naphthylmethyl)carboxyamide]-2'-deoxyuridine
  misc_feature (16)..(16): n is 5-[N-(1-naphthylmethyl)carboxyamide]-2'-deoxyuridine
  misc_feature (21)..(23): n is 5-[N-(1-naphthylmethyl)carboxyamide]-2'-deoxyuridine
  misc_feature (27)..(27): n is 5-[N-(1-naphthylmethyl)carboxyamide]-2'-deoxyuridine
ccgnncaagngcnngnaggannnaaangg

SEQ ID NO: 691 - DNA, 29 bp, Artificial Sequence
  Synthetic
  misc_feature (4)..(5): n is 5-[N-(1-naphthylmethyl)carboxyamide]-2'-deoxyuridine
  misc_feature (10)..(10): n is 5-[N-(1-naphthylmethyl)carboxyamide]-2'-deoxyuridine
  misc_feature (13)..(13): n is 5-[N-(1-naphthylmethyl)carboxyamide]-2'-deoxyuridine
  misc_feature (14)..(14): n is 5-[N-(1-naphthylmethyl)carboxyamide]-2'-O-methyl-uridine
  misc_feature (16)..(16): n is 5-[N-(1-naphthylmethyl)carboxyamide]-2'-deoxyuridine
  misc_feature (21)..(23): n is 5-[N-(1-naphthylmethyl)carboxyamide]-2'-deoxyuridine
  misc_feature (27)..(27): n is 5-[N-(1-naphthylmethyl)carboxyamide]-2'-deoxyuridine
ccgnncaagngcnngnaggannnaaangg

SEQ ID NO: 692 - DNA, 29 bp, Artificial Sequence
  Synthetic
  misc_feature (4)..(5): n is 5-[N-(1-naphthylmethyl)carboxyamide]-2'-deoxyuridine
  misc_feature (10)..(10): n is 5-[N-(1-naphthylmethyl)carboxyamide]-2'-deoxyuridine
  misc_feature (13)..(14): n is 5-[N-(1-naphthylmethyl)carboxyamide]-2'-deoxyuridine
  misc_feature (16)..(16): n is 5-[N-(1-naphthylmethyl)carboxyamide]-2'-O-methyl-uridine
  misc_feature (21)..(23): n is 5-[N-(1-naphthylmethyl)carboxyamide]-2'-deoxyuridine
  misc_feature (27)..(27): n is 5-[N-(1-naphthylmethyl)carboxyamide]-2'-deoxyuridine
ccgnncaagngcnngnaggannnaaangg

SEQ ID NO: 693 - DNA, 29 bp, Artificial Sequence
  Synthetic
  misc_feature (4)..(5): n is 5-[N-(1-naphthylmethyl)carboxyamide]-2'-deoxyuridine
  misc_feature (10)..(10): n is 5-[N-(1-naphthylmethyl)carboxyamide]-2'-deoxyuridine
  misc_feature (13)..(14): n is 5-[N-(1-naphthylmethyl)carboxyamide]-2'-deoxyuridine
  misc_feature (16)..(16): n is 5-[N-(1-naphthylmethyl)carboxyamide]-2'-deoxyuridine
  misc_feature (21)..(21): n is 5-[N-(1-naphthylmethyl)carboxyamide]-2'-O-methyl-uridine
  misc_feature (22)..(23): n is 5-[N-(1-naphthylmethyl)carboxyamide]-2'-deoxyuridine
  misc_feature (27)..(27): n is 5-[N-(1-naphthylmethyl)carboxyamide]-2'-deoxyuridine
ccgnncaagngcnngnaggannnaaangg

SEQ ID NO: 694 - DNA, 29 bp, Artificial Sequence
  Synthetic
  misc_feature (4)..(5): n is 5-[N-(1-naphthylmethyl)carboxyamide]-2'-deoxyuridine
  misc_feature (10)..(10): n is 5-[N-(1-naphthylmethyl)carboxyamide]-2'-deoxyuridine
  misc_feature (13)..(14): n is 5-[N-(1-naphthylmethyl)carboxyamide]-2'-deoxyuridine
  misc_feature (16)..(16): n is 5-[N-(1-naphthylmethyl)carboxyamide]-2'-deoxyuridine
  misc_feature (21)..(21): n is 5-[N-(1-naphthylmethyl)carboxyamide]-2'-deoxyuridine
  misc_feature (22)..(22): n is 5-[N-(1-naphthylmethyl)carboxyamide]-2'-O-methyl-uridine
  misc_feature (23)..(23): n is 5-[N-(1-naphthylmethyl)carboxyamide]-2'-deoxyuridine
  misc_feature (27)..(27): n is 5-[N-(1-naphthylmethyl)carboxyamide]-2'-deoxyuridine
ccgnncaagngcnngnaggannnaaangg

SEQ ID NO: 695 - DNA, 29 bp, Artificial Sequence
  Synthetic
  misc_feature (4)..(5): n is 5-[N-(1-naphthylmethyl)carboxyamide]-2'-deoxyuridine
  misc_feature (10)..(10): n is 5-[N-(1-naphthylmethyl)carboxyamide]-2'-deoxyuridine
  misc_feature (13)..(14): n is 5-[N-(1-naphthylmethyl)carboxyamide]-2'-deoxyuridine
  misc_feature (16)..(16): n is 5-[N-(1-naphthylmethyl)carboxyamide]-2'-deoxyuridine
  misc_feature (21)..(22): n is 5-[N-(1-naphthylmethyl)carboxyamide]-2'-deoxyuridine
  misc_feature (23)..(23): n is 5-[N-(1-naphthylmethyl)carboxyamide]-2'-O-methyl-uridine
  misc_feature (27)..(27): n is 5-[N-(1-naphthylmethyl)carboxyamide]-2'-deoxyuridine
ccgnncaagngcnngnaggannnaaangg

SEQ ID NO: 696 - DNA, 29 bp, Artificial Sequence
  Synthetic
  misc_feature (4)..(5): n is 5-[N-(1-naphthylmethyl)carboxyamide]-2'-deoxyuridine
  misc_feature (10)..(10): n is 5-[N-(1-naphthylmethyl)carboxyamide]-2'-deoxyuridine
  misc_feature (13)..(14): n is 5-[N-(1-naphthylmethyl)carboxyamide]-2'-deoxyuridine
  misc_feature (16)..(16): n is 5-[N-(1-naphthylmethyl)carboxyamide]-2'-deoxyuridine
  misc_feature (21)..(23): n is 5-[N-(1-naphthylmethyl)carboxyamide]-2'-deoxyuridine
  misc_feature (27)..(27): n is 5-[N-(1-naphthylmethyl)carboxyamide]-2'- O-methyl-uridine
ccgnncaagngcnngnaggannnaaangg

SEQ ID NO: 697 - DNA, 29 bp, Artificial Sequence
  Synthetic
  misc_feature (4)..(5): n is 5-[N-(1-naphthylmethyl)carboxyamide]-2'-deoxyuridine
  misc_feature (10)..(10): n is 5-[N-(1-naphthylmethyl)carboxyamide]-2'-deoxyuridine
  misc_feature (13)..(14): n is 5-[N-(1-naphthylmethyl)carboxyamide]-2'-deoxyuridine
  misc_feature (15)..(15): n is 1,3-propane diol
  misc_feature (16)..(16): n is 5-[N-(1-naphthylmethyl)carboxyamide]-2'-deoxyuridine
  misc_feature (18)..(18): n is 1,3-propane diol
  misc_feature (21)..(23): n is 5-[N-(1-naphthylmethyl)carboxyamide]-2'-deoxyuridine
  misc_feature (27)..(27): n is 5-[N-(1-naphthylmethyl)carboxyamide]-2'-deoxyuridine
ccgnncaagngcnnnnangannnaaangg

SEQ ID NO: 698 - DNA, 29 bp, Artificial Sequence
  Synthetic
  misc_feature (4)..(5): n is 5-[N-(1-naphthylmethyl)carboxyamide]-2'-deoxyuridine
  misc_feature (9)..(9): n is 2'-O-methyl-guanosine
  misc_feature (10)..(10): n is 5-[N-(1-naphthylmethyl)carboxyamide]-2'-deoxyuridine
  misc_feature (13)..(14): n is 5-[N-(1-naphthylmethyl)carboxyamide]-2'-deoxyuridine
  misc_feature (15)..(15): n is 1,3-propane diol
  misc_feature (16)..(16): n is 5-[N-(1-naphthylmethyl)carboxyamide]-2'-deoxyuridine
  misc_feature (17)..(17): n is 2'-O-methyl-adenosine
  misc_feature (18)..(18): n is 1,3-propane diol
  misc_feature (21)..(23): n is 5-[N-(1-naphthylmethyl)carboxyamide]-2'-deoxyuridine
  misc_feature (27)..(27): n is 5-[N-(1-naphthylmethyl)carboxyamide]-2'-deoxyuridine
ccgnncaanngcnnnnnngannnaaangg

SEQ ID NO: 699 - DNA, 29 bp, Artificial Sequence
  Synthetic
  misc_feature (4)..(5): n is 5-[N-(1-naphthylmethyl)carboxyamide]-2'-deoxyuridine
  misc_feature (6)..(6): n is 2'-O-methyl-cytidine
  misc_feature (9)..(9): n is 2'-O-methyl-guanosine
  misc_feature (10)..(10): n is 5-[N-(1-naphthylmethyl)carboxyamide]-2'-deoxyuridine
  misc_feature (12)..(12): n is 2'-O-methyl-cytidine
  misc_feature (13)..(14): n is 5-[N-(1-naphthylmethyl)carboxyamide]-2'-deoxyuridine
  misc_feature (15)..(15): n is 1,3-propane diol
  misc_feature (16)..(16): n is 5-[N-(1-naphthylmethyl)carboxyamide]-2'-deoxyuridine
  misc_feature (17)..(17): n is 2'-O-methyl-adenosine
  misc_feature (18)..(18): n is 1,3-propane diol
  misc_feature (21)..(23): n is 5-[N-(1-naphthylmethyl)carboxyamide]-2'-deoxyuridine
  misc_feature (27)..(27): n is 5-[N-(1-naphthylmethyl)carboxyamide]-2'-deoxyuridine
  misc_feature (28)..(29): n is 2'-O-methyl-guanosine
ccgnnnaanngnnnnnnngannnaaannn

SEQ ID NO: 700 - DNA, 29 bp, Artificial Sequence
  Synthetic
  misc_feature (1)..(1): n is 2'-O-methyl-cytidine
  misc_feature (4)..(5): n is 5-[N-(1-naphthylmethyl)carboxyamide]-2'-deoxyuridine
  misc_feature (6)..(6): n is 2'-O-methyl-cytidine
  misc_feature (9)..(9): n is 2'-O-methyl-guanosine
  misc_feature (10)..(10): n is 5-[N-(1-naphthylmethyl)carboxyamide]-2'-deoxyuridine
  misc_feature (12)..(12): n is 2'-O-methyl-cytidine
  misc_feature (13)..(14): n is 5-[N-(1-naphthylmethyl)carboxyamide]-2'-deoxyuridine
  misc_feature (15)..(15): n is 1,3-propane diol
  misc_feature (16)..(16): n is 5-[N-(1-naphthylmethyl)carboxyamide]-2'-deoxyuridine
  misc_feature (17)..(17): n is 2'-O-methyl-adenosine
  misc_feature (18)..(18): n is 1,3-propane diol
  misc_feature (21)..(23): n is 5-[N-(1-naphthylmethyl)carboxyamide]-2'-deoxyuridine
  misc_feature (25)..(25): n is 2'-O-methyl-adenosine
  misc_feature (27)..(27): n is 5-[N-(1-naphthylmethyl)carboxyamide]-2'-deoxyuridine
  misc_feature (28)..(29): n is 2'-O-methyl-guanosine
ncgnnnaanngnnnnnnngannnanannn

SEQ ID NO: 701 - DNA, 29 bp, Artificial Sequence
  Synthetic
  misc_feature (4)..(5): n is 5-[N-(1-naphthylmethyl)carboxyamide]-2'-deoxyuridine
  misc_feature (9)..(9): n is 2'-O-methyl-guanosine
  misc_feature (10)..(10): n is 5-[N-(1-naphthylmethyl)carboxyamide]-2'-deoxyuridine
  misc_feature (13)..(14): n is 5-[N-(1-naphthylmethyl)carboxyamide]-2'-deoxyuridine
  misc_feature (15)..(15): n is 1,3-propane diol
  misc_feature (16)..(16): n is 5-[N-(1-naphthylmethyl)carboxyamide]-2'-deoxyuridine
  misc_feature (17)..(17): n is 2'-O-methyl-adenosine
  misc_feature (21)..(23): n is 5-[N-(1-naphthylmethyl)carboxyamide]-2'-deoxyuridine
  misc_feature (27)..(27): n is 5-[N-(1-naphthylmethyl)carboxyamide]-2'-deoxyuridine
ccgnncaanngcnnnnnggannnaaangg

SEQ ID NO: 702 - DNA, 29 bp, Artificial Sequence
  Synthetic
  misc_feature (4)..(5): n is 5-[N-(1-naphthylmethyl)carboxyamide]-2'-deoxyuridine
  misc_feature (6)..(6): n is 2'-O-methyl-cytidine
  misc_feature (9)..(9): n is 2'-O-methyl-guanosine
  misc_feature (10)..(10): n is 5-[N-(1-naphthylmethyl)carboxyamide]-2'-deoxyuridine
  misc_feature (12)..(12): n is 2'-O-methyl-cytidine
  misc_feature (13)..(14): n is 5-[N-(1-naphthylmethyl)carboxyamide]-2'-deoxyuridine
  misc_feature (15)..(15): n is 1,3-propane diol
  misc_feature (16)..(16): n is 5-[N-(1-naphthylmethyl)carboxyamide]-2'-deoxyuridine
  misc_feature (17)..(17): n is 2'-O-methyl-adenosine
  misc_feature (18)..(18): n is 2'-O-methyl-guanosine
  misc_feature (21)..(23): n is 5-[N-(1-naphthylmethyl)carboxyamide]-2'-deoxyuridine
  misc_feature (27)..(27): n is 5-[N-(1-naphthylmethyl)carboxyamide]-2'-deoxyuridine
  misc_feature (28)..(29): n is 2'-O-methyl-guanosine
ccgnnnaanngnnnnnnngannnaaannn

SEQ ID NO: 703 - DNA, 29 bp, Artificial Sequence
  Synthetic
  misc_feature (1)..(1): n is 2'-O-methyl-cytidine
  misc_feature (4)..(5): n is 5-[N-(1-naphthylmethyl)carboxyamide]-2'-deoxyuridine
  misc_feature (6)..(6): n is 2'-O-methyl-cytidine
  misc_feature (9)..(9): n is 2'-O-methyl-guanosine
  misc_feature (10)..(10): n is 5-[N-(1-naphthylmethyl)carboxyamide]-2'-deoxyuridine
  misc_feature (12)..(12): n is 2'-O-methyl-cytidine
  misc_feature (13)..(14): n is 5-[N-(1-naphthylmethyl)carboxyamide]-2'-deoxyuridine
  misc_feature (15)..(15): n is 1,3-propane diol
  misc_feature (16)..(16): n is 5-[N-(1-naphthylmethyl)carboxyamide]-2'-deoxyuridine
  misc_feature (17)..(17): n is 2'-O-methyl-adenosine
  misc_feature (18)..(18): n is 2'-O-methyl-guanosine
  misc_feature (21)..(23): n is 5-[N-(1-naphthylmethyl)carboxyamide]-2'-deoxyuridine
  misc_feature (25)..(25): n is 2'-O-methyl-adenosine
  misc_feature (27)..(27): n is 5-[N-(1-naphthylmethyl)carboxyamide]-2'-deoxyuridine
  misc_feature (28)..(29): n is 2'-O-methyl-guanosine
ncgnnnaanngnnnnnnngannnanannn

SEQ ID NO: 704 - DNA, 29 bp, Artificial Sequence
  Synthetic
  misc_feature (4)..(5): n is 5-[N-(1-naphthylmethyl)carboxyamide]-2'-deoxyuridine
  misc_feature (6)..(6): n is 2'-O-methyl-cytidine
  misc_feature (9)..(9): n is 2'-O-methyl-guanosine
  misc_feature (10)..(10): n is 5-[N-(1-naphthylmethyl)carboxyamide]-2'-deoxyuridine
  misc_feature (12)..(12): n is 2'-O-methyl-cytidine
  misc_feature (13)..(14): n is 5-[N-(1-naphthylmethyl)carboxyamide]-2'-deoxyuridine
  misc_feature (15)..(15): n is 1,3-propane diol
  misc_feature (16)..(16): n is 5-[N-(1-naphthylmethyl)carboxyamide]-2'-deoxyuridine
  misc_feature (17)..(17): n is 2'-O-methyl-adenosine
  misc_feature (18)..(18): n is 2'-O-methyl-guanosine
  misc_feature (21)..(21): n is 5-[N-(1-naphthylmethyl)carboxyamide]-2'-deoxyuridine
  misc_feature (22)..(22): n is 5-[N-(1-naphthylmethyl)carboxyamide]-2'-O-methyl-uridine
  misc_feature (23)..(23): n is 5-[N-(1-naphthylmethyl)carboxyamide]-2'-deoxyuridine
  misc_feature (27)..(27): n is 5-[N-(1-naphthylmethyl)carboxyamide]-2'-deoxyuridine
  misc_feature (28)..(29): n is 2'-O-methyl-guanosine
ccgnnnaanngnnnnnnngannnaaannn

SEQ ID NO: 705 - DNA, 29 bp, Artificial Sequence
  Synthetic
  misc_feature (4)..(5): n is 5-[N-(1-naphthylmethyl)carboxyamide]-2'-deoxyuridine
  misc_feature (6)..(6): n is 2'-O-methyl-cytidine
  misc_feature (9)..(9): n is 2'-O-methyl-guanosine
  misc_feature (10)..(10): n is 5-[N-(1-naphthylmethyl)carboxyamide]-2'-deoxyuridine
  misc_feature (12)..(12): n is 2'-O-methyl-cytidine
  misc_feature (13)..(14): n is 5-[N-(1-naphthylmethyl)carboxyamide]-2'-deoxyuridine
  misc_feature (15)..(15): n is 2'-O-methyl-guanosine
  misc_feature (16)..(16): n is 5-[N-(1-naphthylmethyl)carboxyamide]-2'-deoxyuridine
  misc_feature (17)..(17): n is 2'-O-methyl-adenosine
  misc_feature (18)..(18): n is 2'-O-methyl-guanosine
  misc_feature (21)..(23): n is 5-[N-(1-naphthylmethyl)carboxyamide]-2'-deoxyuridine
  misc_feature (27)..(27): n is 5-[N-(1-naphthylmethyl)carboxyamide]-2'-deoxyuridine
  misc_feature (28)..(29): n is 2'-O-methyl-guanosine
ccgnnnaanngnnnnnnngannnaaannn

SEQ ID NO: 706 - DNA, 29 bp, Artificial Sequence
  Synthetic
  misc_feature (4)..(5): n is 5-[N-(1-naphthylmethyl)carboxyamide]-2'-deoxyuridine
  misc_feature (6)..(6): n is 2'-O-methyl-cytidine
  misc_feature (9)..(9): n is 2'-O-methyl-guanosine
  misc_feature (10)..(10): n is 5-[N-(1-naphthylmethyl)carboxyamide]-2'-deoxyuridine
  misc_feature (12)..(12): n is 2'-O-methyl-cytidine
  misc_feature (13)..(14): n is 5-[N-(1-naphthylmethyl)carboxyamide]-2'-deoxyuridine
  misc_feature (15)..(15): n is 2'-O-methyl-guanosine
  misc_feature (16)..(16): n is 5-[N-(1-naphthylmethyl)carboxyamide]-2'-deoxyuridine
  misc_feature (17)..(17): n is 2'-O-methyl-adenosine
  misc_feature (18)..(18): n is 2'-O-methyl-guanosine
  misc_feature (21)..(21): n is 5-[N-(1-naphthylmethyl)carboxyamide]-2'-deoxyuridine
  misc_feature (22)..(22): n is 5-[N-(1-naphthylmethyl)carboxyamide]-2'-O-methyl-uridine
  misc_feature (23)..(23): n is 5-[N-(1-naphthylmethyl)carboxyamide]-2'-deoxyuridine
  misc_feature (27)..(27): n is 5-[N-(1-naphthylmethyl)carboxyamide]-2'-deoxyuridine
  misc_feature (28)..(29): n is 2'-O-methyl-guanosine
ccgnnnaanngnnnnnnngannnaaannn

SEQ ID NO: 707 - DNA, 48 bp, Artificial Sequence
  Synthetic
  misc_feature (1)..(1): n is 5-(N-benzylcarboxyamide)-2'-deoxyuridine
  misc_feature (2)..(2): n is 5-[N-(3,4-methylenedioxyphenyl-methyl)carboxyamide]-2'-deoxyuridi ne
  misc_feature (3)..(3): n is 2'-O-methyl-adenosine
  misc_feature (5)..(5): n is hexaethylene glycol
  misc_feature (7)..(7): n is 5-(N-benzylcarboxyamide)-2'-O-methyl-uridine
  misc_feature (8)..(8): n is 5-(N-benzylcarboxyamide)-2'-deoxyuridine
  misc_feature (11)..(11): n is 1,3-propane diol
  misc_feature (12)..(12): n is 2'-O-methyl-cytidine
  misc_feature (16)..(17): n is 5-(N-benzylcarboxyamide)-2'-deoxyuridine
  misc_feature (18)..(18): n is 5-(N-benzylcarboxyamide)-2'-O-methyl-uridine
  misc_feature (19)..(19): n is 2'-O-methyl-adenosine
  misc_feature (20)..(20): n is 5-(N-benzylcarboxyamide)-2'-deoxyuridine
  misc_feature (21)..(21): n is 2'-O-methyl-adenosine
  misc_feature (24)..(24): n is 2'-O-methyl-guanosine
  misc_feature (25)..(25): n is 5-(N-benzylcarboxyamide)-2'-deoxyuridine
  misc_feature (26)..(26): n is 5-[N-(3,4-methylenedioxyphenyl-methyl)carboxyamide]-2'-deoxyuridi ne
  misc_feature (27)..(27): n is 2'-O-methyl-adenosine
  misc_feature (29)..(29): n is hexaethylene glycol
  misc_feature (31)..(31): n is 5-(N-benzylcarboxyamide)-2'-O-methyl-uridine
  misc_feature (32)..(32): n is 5-(N-benzylcarboxyamide)-2'-deoxyuridine
  misc_feature (35)..(35): n is 1,3-propane diol
  misc_feature (36)..(36): n is 2'-O-methyl-cytidine
  misc_feature (40)..(41): n is 5-(N-benzylcarboxyamide)-2'-deoxyuridine
  misc_feature (42)..(42): n is 5-(N-benzylcarboxyamide)-2'-O-methyl-uridine
  misc_feature (43)..(43): n is 2'-O-methyl-adenosine
  misc_feature (44)..(44): n is 5-(N-benzylcarboxyamide)-2'-deoxyuridine
  misc_feature (45)..(45): n is 2'-O-methyl-adenosine
  misc_feature (48)..(48): n is 2'-O-methyl-guanosine
nnncngnnacnngcgnnnnnngcnnnncngnnacnngcgnnnnnngcn

SEQ ID NO: 708 - DNA, 49 bp, Artificial Sequence
  Synthetic
  misc_feature (1)..(1): n is 5-(N-benzylcarboxyamide)-2'-deoxyuridine
  misc_feature (2)..(2): n is 5-[N-(3,4-methylenedioxyphenyl-methyl)carboxyamide]-2'-deoxyuridi ne
  misc_feature (3)..(3): n is 2'-O-methyl-adenosine
  misc_feature (5)..(5): n is hexaethylene glycol
  misc_feature (7)..(7): n is 5-(N-benzylcarboxyamide)-2'-O-methyl-uridine
  misc_feature (8)..(8): n is 5-(N-benzylcarboxyamide)-2'-deoxyuridine
  misc_feature (11)..(11): n is 1,3-propane diol
  misc_feature (12)..(12): n is 2'-O-methyl-cytidine
  misc_feature (16)..(17): n is 5-(N-benzylcarboxyamide)-2'-deoxyuridine
  misc_feature (18)..(18): n is 5-(N-benzylcarboxyamide)-2'-O-methyl-uridine
  misc_feature (19)..(19): n is 2'-O-methyl-adenosine
  misc_feature (20)..(20): n is 5-(N-benzylcarboxyamide)-2'-deoxyuridine
  misc_feature (21)..(21): n is 2'-O-methyl-adenosine
  misc_feature (24)..(24): n is 2'-O-methyl-guanosine
  misc_feature (25)..(25): n is hexaethylene glycol
  misc_feature (26)..(26): n is 5-(N-benzylcarboxyamide)-2'-deoxyuridine
  misc_feature (27)..(27): n is 5-[N-(3,4-methylenedioxyphenyl-methyl)carboxyamide]-2'-deoxyuridi ne
  misc_feature (28)..(28): n is 2'-O-methyl-adenosine
  misc_feature (30)..(30): n is hexaethylene glycol
  misc_feature (32)..(32): n is 5-(N-benzylcarboxyamide)-2'-O-methyl-uridine
  misc_feature (33)..(33): n is 5-(N-benzylcarboxyamide)-2'-deoxyuridine
  misc_feature (36)..(36): n is 1,3-propane diol
  misc_feature (37)..(37): n is 2'-O-methyl-cytidine
  misc_feature (41)..(42): n is 5-(N-benzylcarboxyamide)-2'-deoxyuridine
  misc_feature (43)..(43): n is 5-(N-benzylcarboxyamide)-2'-O-methyl-uridine
  misc_feature (44)..(44): n is 2'-O-methyl-adenosine
  misc_feature (45)..(45): n is 5-(N-benzylcarboxyamide)-2'-deoxyuridine
  misc_feature (46)..(46): n is 2'-O-methyl-adenosine
  misc_feature (49)..(49): n is 2'-O-methyl-guanosine
nnncngnnacnngcgnnnnnngcnnnnncngnnacnngcgnnnnnngcn

SEQ ID NO: 709 - DNA, 50 bp, Artificial Sequence
  Synthetic
  misc_feature (1)..(1): n is 5-(N-benzylcarboxyamide)-2'-deoxyuridine
  misc_feature (2)..(2): n is 5-[N-(3,4-methylenedioxyphenyl-methyl)carboxyamide]-2'-deoxyuridi ne
  misc_feature (3)..(3): n is 2'-O-methyl-adenosine
  misc_feature (5)..(5): n is hexaethylene glycol
  misc_feature (7)..(7): n is 5-(N-benzylcarboxyamide)-2'-O-methyl-uridine
  misc_feature (8)..(8): n is 5-(N-benzylcarboxyamide)-2'-deoxyuridine
  misc_feature (11)..(11): n is 1,3-propane diol
  misc_feature (12)..(12): n is 2'-O-methyl-cytidine
  misc_feature (16)..(17): n is 5-(N-benzylcarboxyamide)-2'-deoxyuridine
  misc_feature (18)..(18): n is 5-(N-benzylcarboxyamide)-2'-O-methyl-uridine
  misc_feature (19)..(19): n is 2'-O-methyl-adenosine
  misc_feature (20)..(20): n is 5-(N-benzylcarboxyamide)-2'-deoxyuridine
  misc_feature (21)..(21): n is 2'-O-methyl-adenosine
  misc_feature (24)..(24): n is 2'-O-methyl-guanosine
  misc_feature (25)..(26): n is hexaethylene glycol
  misc_feature (27)..(27): n is 5-(N-benzylcarboxyamide)-2'-deoxyuridine
  misc_feature (28)..(28): n is 5-[N-(3,4-methylenedioxyphenyl-methyl)carboxyamide]-2'-deoxyuridi ne
  misc_feature (29)..(29): n is 2'-O-methyl-adenosine
  misc_feature (31)..(31): n is hexaethylene glycol
  misc_feature (33)..(33): n is 5-(N-benzylcarboxyamide)-2'-O-methyl-uridine
  misc_feature (34)..(34): n is 5-(N-benzylcarboxyamide)-2'-deoxyuridine
  misc_feature (37)..(37): n is 1,3-propane diol
  misc_feature (38)..(38): n is 2'-O-methyl-cytidine
  misc_feature (42)..(43): n is 5-(N-benzylcarboxyamide)-2'-deoxyuridine
  misc_feature (44)..(44): n is 5-(N-benzylcarboxyamide)-2'-O-methyl-uridine
  misc_feature (45)..(45): n is 2'-O-methyl-adenosine
  misc_feature (46)..(46): n is 5-(N-benzylcarboxyamide)-2'-deoxyuridine
  misc_feature (47)..(47): n is 2'-O-methyl-adenosine
  misc_feature (50)..(50): n is 2'-O-methyl-guanosine
nnncngnnacnngcgnnnnnngcnnnnnncngnnacnngcgnnnnnngcn

SEQ ID NO: 710 - DNA, 51 bp, Artificial Sequence
  Synthetic
  misc_feature (1)..(1): n is 5-(N-benzylcarboxyamide)-2'-deoxyuridine
  misc_feature (2)..(2): n is 5-[N-(3,4-methylenedioxyphenyl-methyl)carboxyamide]-2'-deoxyuridi ne
  misc_feature (3)..(3): n is 2'-O-methyl-adenosine
  misc_feature (5)..(5): n is hexaethylene glycol
  misc_feature (7)..(7): n is 5-(N-benzylcarboxyamide)-2'-O-methyl-uridine
  misc_feature (8)..(8): n is 5-(N-benzylcarboxyamide)-2'-deoxyuridine
  misc_feature (11)..(11): n is 1,3-propane diol
  misc_feature (12)..(12): n is 2'-O-methyl-cytidine
  misc_feature (16)..(17): n is 5-(N-benzylcarboxyamide)-2'-deoxyuridine
  misc_feature (18)..(18): n is 5-(N-benzylcarboxyamide)-2'-O-methyl-uridine
  misc_feature (19)..(19): n is 2'-O-methyl-adenosine
  misc_feature (20)..(20): n is 5-(N-benzylcarboxyamide)-2'-deoxyuridine
  misc_feature (21)..(21): n is 2'-O-methyl-adenosine
  misc_feature (24)..(24): n is 2'-O-methyl-guanosine
  misc_feature (25)..(27): n is hexaethylene glycol
  misc_feature (28)..(28): n is 5-(N-benzylcarboxyamide)-2'-deoxyuridine
  misc_feature (29)..(29): n is 5-[N-(3,4-methylenedioxyphenyl-methyl)carboxyamide]-2'-deoxyuridi ne
  misc_feature (30)..(30): n is 2'-O-methyl-adenosine
  misc_feature (32)..(32): n is hexaethylene glycol
  misc_feature (34)..(34): n is 5-(N-benzylcarboxyamide)-2'-O-methyl-uridine
  misc_feature (35)..(35): n is 5-(N-benzylcarboxyamide)-2'-deoxyuridine
  misc_feature (38)..(38): n is 1,3-propane diol
  misc_feature (39)..(39): n is 2'-O-methyl-cytidine
  misc_feature (43)..(44): n is 5-(N-benzylcarboxyamide)-2'-deoxyuridine
  misc_feature (45)..(45): n is 5-(N-benzylcarboxyamide)-2'-O-methyl-uridine
  misc_feature (46)..(46): n is 2'-O-methyl-adenosine
  misc_feature (47)..(47): n is 5-(N-benzylcarboxyamide)-2'-deoxyuridine
  misc_feature (48)..(48): n is 2'-O-methyl-adenosine
  misc_feature (51)..(51): n is 2'-O-methyl-guanosine
nnncngnnacnngcgnnnnnngcnnnnnnncngnnacnngcgnnnnnngcn

SEQ ID NO: 711 - DNA, 52 bp, Artificial Sequence
  Synthetic
  misc_feature (1)..(1): n is 5-(N-benzylcarboxyamide)-2'-deoxyuridine
  misc_feature (2)..(2): n is 5-[N-(3,4-methylenedioxyphenyl-methyl)carboxyamide]-2'-deoxyuridi ne
  misc_feature (3)..(3): n is 2'-O-methyl-adenosine
  misc_feature (5)..(5): n is hexaethylene glycol
  misc_feature (7)..(7): n is 5-(N-benzylcarboxyamide)-2'-O-methyl-uridine
  misc_feature (8)..(8): n is 5-(N-benzylcarboxyamide)-2'-deoxyuridine
  misc_feature (11)..(11): n is 1,3-propane diol
  misc_feature (12)..(12): n is 2'-O-methyl-cytidine
  misc_feature (16)..(17): n is 5-(N-benzylcarboxyamide)-2'-deoxyuridine
  misc_feature (18)..(18): n is 5-(N-benzylcarboxyamide)-2'-O-methyl-uridine
  misc_feature (19)..(19): n is 2'-O-methyl-adenosine
  misc_feature (20)..(20): n is 5-(N-benzylcarboxyamide)-2'-deoxyuridine
  misc_feature (21)..(21): n is 2'-O-methyl-adenosine
  misc_feature (24)..(24): n is 2'-O-methyl-guanosine
  misc_feature (25)..(28): n is hexaethylene glycol
  misc_feature (29)..(29): n is 5-(N-benzylcarboxyamide)-2'-deoxyuridine
  misc_feature (30)..(30): n is 5-[N-(3,4-methylenedioxyphenyl-methyl)carboxyamide]-2'-deoxyuridi ne
  misc_feature (31)..(31): n is 2'-O-methyl-adenosine
  misc_feature (33)..(33): n is hexaethylene glycol
  misc_feature (35)..(35): n is 5-(N-benzylcarboxyamide)-2'-O-methyl-uridine
  misc_feature (36)..(36): n is 5-(N-benzylcarboxyamide)-2'-deoxyuridine
  misc_feature (39)..(39): n is 1,3-propane diol
  misc_feature (40)..(40): n is 2'-O-methyl-cytidine
  misc_feature (44)..(45): n is 5-(N-benzylcarboxyamide)-2'-deoxyuridine
  misc_feature (46)..(46): n is 5-(N-benzylcarboxyamide)-2'-O-methyl-uridine
  misc_feature (47)..(47): n is 2'-O-methyl-adenosine
  misc_feature (48)..(48): n is 5-(N-benzylcarboxyamide)-2'-deoxyuridine
  misc_feature (49)..(49): n is 2'-O-methyl-adenosine
  misc_feature (52)..(52): n is 2'-O-methyl-guanosine
nnncngnnacnngcgnnnnnngcnnnnnnnncngnnacnngcgnnnnnngcn

SEQ ID NO: 712 - DNA, 53 bp, Artificial Sequence
  Synthetic
  misc_feature (1)..(1): n is 5-(N-benzylcarboxyamide)-2'-deoxyuridine
  misc_feature (2)..(2): n is 5-[N-(3,4-methylenedioxyphenyl-methyl)carboxyamide]-2'-deoxyuridi ne
  misc_feature (3)..(3): n is 2'-O-methyl-adenosine
  misc_feature (5)..(5): n is hexaethylene glycol
  misc_feature (7)..(7): n is 5-(N-benzylcarboxyamide)-2'-O-methyl-uridine
  misc_feature (8)..(8): n is 5-(N-benzylcarboxyamide)-2'-deoxyuridine
  misc_feature (11)..(11): n is 1,3-propane diol
  misc_feature (12)..(12): n is 2'-O-methyl-cytidine
  misc_feature (16)..(17): n is 5-(N-benzylcarboxyamide)-2'-deoxyuridine
  misc_feature (18)..(18): n is 5-(N-benzylcarboxyamide)-2'-O-methyl-uridine
  misc_feature (19)..(19): n is 2'-O-methyl-adenosine
  misc_feature (20)..(20): n is 5-(N-benzylcarboxyamide)-2'-deoxyuridine
  misc_feature (21)..(21): n is 2'-O-methyl-adenosine
  misc_feature (24)..(24): n is 2'-O-methyl-guanosine
  misc_feature (25)..(29): n is hexaethylene glycol
  misc_feature (30)..(30): n is 5-(N-benzylcarboxyamide)-2'-deoxyuridine
  misc_feature (31)..(31): n is 5-[N-(3,4-methylenedioxyphenyl-methyl)carboxyamide]-2'-deoxyuridi ne
  misc_feature (32)..(32): n is 2'-O-methyl-adenosine
  misc_feature (34)..(34): n is hexaethylene glycol
  misc_feature (36)..(36): n is 5-(N-benzylcarboxyamide)-2'-O-methyl-uridine
  misc_feature (37)..(37): n is 5-(N-benzylcarboxyamide)-2'-deoxyuridine
  misc_feature (40)..(40): n is 1,3-propane diol
  misc_feature (41)..(41): n is 2'-O-methyl-cytidine
  misc_feature (45)..(46): n is 5-(N-benzylcarboxyamide)-2'-deoxyuridine
  misc_feature (47)..(47): n is 5-(N-benzylcarboxyamide)-2'-O-methyl-uridine
  misc_feature (48)..(48): n is 2'-O-methyl-adenosine
  misc_feature (49)..(49): n is 5-(N-benzylcarboxyamide)-2'-deoxyuridine
  misc_feature (50)..(50): n is 2'-O-methyl-adenosine
  misc_feature (53)..(53): n is 2'-O-methyl-guanosine
nnncngnnacnngcgnnnnnngcnnnnnnnnncngnnacnngcgnnnnnngcn

SEQ ID NO: 713 - DNA, 54 bp, Artificial Sequence
  Synthetic
  misc_feature (1)..(1): n is 5-(N-benzylcarboxyamide)-2'-deoxyuridine
  misc_feature (2)..(2): n is 5-[N-(3,4-methylenedioxyphenyl-methyl)carboxyamide]-2'-deoxyuridi ne
  misc_feature (3)..(3): n is 2'-O-methyl-adenosine
  misc_feature (5)..(5): n is hexaethylene glycol
  misc_feature (7)..(7): n is 5-(N-benzylcarboxyamide)-2'-O-methyl-uridine
  misc_feature (8)..(8): n is 5-(N-benzylcarboxyamide)-2'-deoxyuridine
  misc_feature (11)..(11): n is 1,3-propane diol
  misc_feature (12)..(12): n is 2'-O-methyl-cytidine
  misc_feature (16)..(17): n is 5-(N-benzylcarboxyamide)-2'-deoxyuridine
  misc_feature (18)..(18): n is 5-(N-benzylcarboxyamide)-2'-O-methyl-uridine
  misc_feature (19)..(19): n is 2'-O-methyl-adenosine
  misc_feature (20)..(20): n is 5-(N-benzylcarboxyamide)-2'-deoxyuridine
  misc_feature (21)..(21): n is 2'-O-methyl-adenosine
  misc_feature (24)..(24): n is 2'-O-methyl-guanosine
  misc_feature (25)..(30): n is hexaethylene glycol
  misc_feature (31)..(31): n is 5-(N-benzylcarboxyamide)-2'-deoxyuridine
  misc_feature (32)..(32): n is 5-[N-(3,4-methylenedioxyphenyl-methyl)carboxyamide]-2'-deoxyuridi ne
  misc_feature (33)..(33): n is 2'-O-methyl-adenosine
  misc_feature (35)..(35): n is hexaethylene glycol
  misc_feature (37)..(37): n is 5-(N-benzylcarboxyamide)-2'-O-methyl-uridine
  misc_feature (38)..(38): n is 5-(N-benzylcarboxyamide)-2'-deoxyuridine
  misc_feature (41)..(41): n is 1,3-propane diol
  misc_feature (42)..(42): n is 2'-O-methyl-cytidine
  misc_feature (46)..(47): n is 5-(N-benzylcarboxyamide)-2'-deoxyuridine
  misc_feature (48)..(48): n is 5-(N-benzylcarboxyamide)-2'-O-methyl-uridine
  misc_feature (49)..(49): n is 2'-O-methyl-adenosine
  misc_feature (50)..(50): n is 5-(N-benzylcarboxyamide)-2'-deoxyuridine
  misc_feature (51)..(51): n is 2'-O-methyl-adenosine
  misc_feature (54)..(54): n is 2'-O-methyl-guanosine
nnncngnnacnngcgnnnnnngcnnnnnnnnnncngnnacnngcgnnnnnngcn

SEQ ID NO: 714 - DNA, 48 bp, Artificial Sequence
  Synthetic
  misc_feature (1)..(1): n is 5-(N-benzylcarboxyamide)-2'-deoxyuridine
  misc_feature (2)..(2): n is 5-[N-(3,4-methylenedioxyphenyl-methyl)carboxyamide]-2'-deoxyuridi ne
  misc_feature (3)..(3): n is 2'-O-methyl-adenosine
  misc_feature (5)..(5): n is hexaethylene glycol
  misc_feature (7)..(7): n is 5-(N-benzylcarboxyamide)-2'-O-methyl-uridine
  misc_feature (8)..(8): n is 5-(N-benzylcarboxyamide)-2'-deoxyuridine
  misc_feature (11)..(11): n is 1,3-propane diol
  misc_feature (12)..(12): n is 2'-O-methyl-cytidine
  misc_feature (16)..(17): n is 5-(N-benzylcarboxyamide)-2'-deoxyuridine
  misc_feature (18)..(18): n is 5-(N-benzylcarboxyamide)-2'-O-methyl-uridine
  misc_feature (19)..(19): n is 2'-O-methyl-adenosine
  misc_feature (20)..(20): n is 5-(N-benzylcarboxyamide)-2'-deoxyuridine
  misc_feature (21)..(21): n is 2'-O-methyl-adenosine
  misc_feature (24)..(25): n is 2'-O-methyl-guanosine
  misc_feature (28)..(28): n is 2'-O-methyl-adenosine
  misc_feature (29)..(29): n is 5-(N-benzylcarboxyamide)-2'-deoxyuridine
  misc_feature (30)..(30): n is 2'-O-methyl-adenosine
  misc_feature (31)..(31): n is 5-(N-benzylcarboxyamide)-2'-O-methyl-uridine
  misc_feature (32)..(33): n is 5-(N-benzylcarboxyamide)-2'-deoxyuridine
  misc_feature (37)..(37): n is 2'-O-methyl-cytidine
  misc_feature (38)..(38): n is 1,3-propane diol
  misc_feature (41)..(41): n is 5-(N-benzylcarboxyamide)-2'-deoxyuridine
  misc_feature (42)..(42): n is 5-(N-benzylcarboxyamide)-2'-O-methyl-uridine
  misc_feature (44)..(44): n is hexaethylene glycol
  misc_feature (46)..(46): n is 2'-O-methyl-adenosine
  misc_feature (47)..(47): n is 5-[N-(3,4-methylenedioxyphenyl-methyl)carboxyamide]-2'-deoxyuridi ne
  misc_feature (48)..(48): n is 5-(N-benzylcarboxyamide)-2'-deoxyuridine
nnncngnnacnngcgnnnnnngcnncgnnnnnngcgnncanngncnnn

SEQ ID NO: 715 - DNA, 50 bp, Artificial Sequence
  Synthetic
  misc_feature (1)..(1): n is 5-(N-benzylcarboxyamide)-2'-deoxyuridine
  misc_feature (2)..(2): n is 5-[N-(3,4-methylenedioxyphenyl-methyl)carboxyamide]-2'-deoxyuridi ne
  misc_feature (3)..(3): n is 2'-O-methyl-adenosine
  misc_feature (5)..(5): n is hexaethylene glycol
  misc_feature (7)..(7): n is 5-(N-benzylcarboxyamide)-2'-O-methyl-uridine
  misc_feature (8)..(8): n is 5-(N-benzylcarboxyamide)-2'-deoxyuridine
  misc_feature (11)..(11): n is 1,3-propane diol
  misc_feature (12)..(12): n is 2'-O-methyl-cytidine
  misc_feature (16)..(17): n is 5-(N-benzylcarboxyamide)-2'-deoxyuridine
  misc_feature (18)..(18): n is 5-(N-benzylcarboxyamide)-2'-O-methyl-uridine
  misc_feature (19)..(19): n is 2'-O-methyl-adenosine
  misc_feature (20)..(20): n is 5-(N-benzylcarboxyamide)-2'-deoxyuridine
  misc_feature (21)..(21): n is 2'-O-methyl-adenosine
  misc_feature (24)..(24): n is 2'-O-methyl-guanosine
  misc_feature (25)..(26): n is hexaethylene glycol
  misc_feature (27)..(27): n is 2'-O-methyl-guanosine
  misc_feature (30)..(30): n is 2'-O-methyl-adenosine
  misc_feature (31)..(31): n is 5-(N-benzylcarboxyamide)-2'-deoxyuridine
  misc_feature (32)..(32): n is 2'-O-methyl-adenosine
  misc_feature (33)..(33): n is 5-(N-benzylcarboxyamide)-2'-O-methyl-uridine
  misc_feature (34)..(35): n is 5-(N-benzylcarboxyamide)-2'-deoxyuridine
  misc_feature (39)..(39): n is 2'-O-methyl-cytidine
  misc_feature (40)..(40): n is 1,3-propane diol
  misc_feature (43)..(43): n is 5-(N-benzylcarboxyamide)-2'-deoxyuridine
  misc_feature (44)..(44): n is 5-(N-benzylcarboxyamide)-2'-O-methyl-uridine
  misc_feature (46)..(46): n is hexaethylene glycol
  misc_feature (48)..(48): n is 2'-O-methyl-adenosine
  misc_feature (49)..(49): n is 5-[N-(3,4-methylenedioxyphenyl-methyl)carboxyamide]-2'-deoxyuridi ne
  misc_feature (50)..(50): n is 5-(N-benzylcarboxyamide)-2'-deoxyuridine
nnncngnnacnngcgnnnnnngcnnnncgnnnnnngcgnncanngncnnn

SEQ ID NO: 716 - DNA, 52 bp, Artificial Sequence
  Synthetic
  misc_feature (1)..(1): n is 5-(N-benzylcarboxyamide)-2'-deoxyuridine
  misc_feature (2)..(2): n is 5-[N-(3,4-methylenedioxyphenyl-methyl)carboxyamide]-2'-deoxyuridi ne
  misc_feature (3)..(3): n is 2'-O-methyl-adenosine
  misc_feature (5)..(5): n is hexaethylene glycol
  misc_feature (7)..(7): n is 5-(N-benzylcarboxyamide)-2'-O-methyl-uridine
  misc_feature (8)..(8): n is 5-(N-benzylcarboxyamide)-2'-deoxyuridine
  misc_feature (11)..(11): n is 1,3-propane diol
  misc_feature (12)..(12): n is 2'-O-methyl-cytidine
  misc_feature (16)..(17): n is 5-(N-benzylcarboxyamide)-2'-deoxyuridine
  misc_feature (18)..(18): n is 5-(N-benzylcarboxyamide)-2'-O-methyl-uridine
  misc_feature (19)..(19): n is 2'-O-methyl-adenosine
  misc_feature (20)..(20): n is 5-(N-benzylcarboxyamide)-2'-deoxyuridine
  misc_feature (21)..(21): n is 2'-O-methyl-adenosine
  misc_feature (24)..(24): n is 2'-O-methyl-guanosine
  misc_feature (25)..(28): n is hexaethylene glycol
  misc_feature (29)..(29): n is 2'-O-methyl-guanosine
  misc_feature (32)..(32): n is 2'-O-methyl-adenosine
  misc_feature (33)..(33): n is 5-(N-benzylcarboxyamide)-2'-deoxyuridine
  misc_feature (34)..(34): n is 2'-O-methyl-adenosine
  misc_feature (35)..(35): n is 5-(N-benzylcarboxyamide)-2'-O-methyl-uridine
  misc_feature (36)..(37): n is 5-(N-benzylcarboxyamide)-2'-deoxyuridine
  misc_feature (41)..(41): n is 2'-O-methyl-cytidine
  misc_feature (42)..(42): n is 1,3-propane diol
  misc_feature (45)..(45): n is 5-(N-benzylcarboxyamide)-2'-deoxyuridine
  misc_feature (46)..(46): n is 5-(N-benzylcarboxyamide)-2'-O-methyl-uridine
  misc_feature (48)..(48): n is hexaethylene glycol
  misc_feature (50)..(50): n is 2'-O-methyl-adenosine
  misc_feature (51)..(51): n is 5-[N-(3,4-methylenedioxyphenyl-methyl)carboxyamide]-2'-deoxyuridi ne
  misc_feature (52)..(52): n is 5-(N-benzylcarboxyamide)-2'-deoxyuridine
nnncngnnacnngcgnnnnnngcnnnnnncgnnnnnngcgnncanngncnnn

SEQ ID NO: 717 - DNA, 54 bp, Artificial Sequence
  Synthetic
  misc_feature (1)..(1): n is 5-(N-benzylcarboxyamide)-2'-deoxyuridine
  misc_feature (2)..(2): n is 5-[N-(3,4-methylenedioxyphenyl-methyl)carboxyamide]-2'-deoxyuridi ne
  misc_feature (3)..(3): n is 2'-O-methyl-adenosine
  misc_feature (5)..(5): n is hexaethylene glycol
  misc_feature (7)..(7): n is 5-(N-benzylcarboxyamide)-2'-O-methyl-uridine
  misc_feature (8)..(8): n is 5-(N-benzylcarboxyamide)-2'-deoxyuridine
  misc_feature (11)..(11): n is 1,3-propane diol
  misc_feature (12)..(12): n is 2'-O-methyl-cytidine
  misc_feature (16)..(17): n is 5-(N-benzylcarboxyamide)-2'-deoxyuridine
  misc_feature (18)..(18): n is 5-(N-benzylcarboxyamide)-2'-O-methyl-uridine
  misc_feature (19)..(19): n is 2'-O-methyl-adenosine
  misc_feature (20)..(20): n is 5-(N-benzylcarboxyamide)-2'-deoxyuridine
  misc_feature (21)..(21): n is 2'-O-methyl-adenosine
  misc_feature (24)..(24): n is 2'-O-methyl-guanosine
  misc_feature (25)..(30): n is hexaethylene glycol
  misc_feature (31)..(31): n is 2'-O-methyl-guanosine
  misc_feature (34)..(34): n is 2'-O-methyl-adenosine
  misc_feature (35)..(35): n is 5-(N-benzylcarboxyamide)-2'-deoxyuridine
  misc_feature (36)..(36): n is 2'-O-methyl-adenosine
  misc_feature (37)..(37): n is 5-(N-benzylcarboxyamide)-2'-O-methyl-uridine
  misc_feature (38)..(39): n is 5-(N-benzylcarboxyamide)-2'-deoxyuridine
  misc_feature (43)..(43): n is 2'-O-methyl-cytidine
  misc_feature (44)..(44): n is 1,3-propane diol
  misc_feature (47)..(47): n is 5-(N-benzylcarboxyamide)-2'-deoxyuridine
  misc_feature (48)..(48): n is 5-(N-benzylcarboxyamide)-2'-O-methyl-uridine
  misc_feature (50)..(50): n is hexaethylene glycol
  misc_feature (52)..(52): n is 2'-O-methyl-adenosine
  misc_feature (53)..(53): n is 5-[N-(3,4-methylenedioxyphenyl-methyl)carboxyamide]-2'-deoxyuridi ne
  misc_feature (54)..(54): n is 5-(N-benzylcarboxyamide)-2'-deoxyuridine
nnncngnnacnngcgnnnnnngcnnnnnnnncgnnnnnngcgnncanngncnnn

SEQ ID NO: 718 - DNA, 42 bp, Artificial Sequence
  Synthetic
  misc_feature (9)..(9): n is 5-[N-(1-naphthylmethyl)carboxyamide]-2'-deoxyuridine
  misc_feature (11)..(11): n is 5-[N-(1-naphthylmethyl)carboxyamide]-2'-deoxyuridine
  misc_feature (13)..(13): n is 5-[N-(1-naphthylmethyl)carboxyamide]-2'-deoxyuridine
  misc_feature (19)..(19): n is 5-[N-(1-naphthylmethyl)carboxyamide]-2'-deoxyuridine
  misc_feature (21)..(21): n is 5-[N-(1-naphthylmethyl)carboxyamide]-2'-deoxyuridine
  misc_feature (30)..(30): n is 5-[N-(1-naphthylmethyl)carboxyamide]-2'-deoxyuridine
  misc_feature (32)..(32): n is 5-[N-(1-naphthylmethyl)carboxyamide]-2'-deoxyuridine
  misc_feature (34)..(34): n is 5-[N-(1-naphthylmethyl)carboxyamide]-2'-deoxyuridine
  misc_feature (40)..(40): n is 5-[N-(1-naphthylmethyl)carboxyamide]-2'-deoxyuridine
  misc_feature (42)..(42): n is 5-[N-(1-naphthylmethyl)carboxyamide]-2'-deoxyuridine
cgacagcangnangcacancncgacagcangnangcacancn

SEQ ID NO: 719 - DNA, 43 bp, Artificial Sequence
  Synthetic
  misc_feature (9)..(9): n is 5-[N-(1-naphthylmethyl)carboxyamide]-2'-deoxyuridine
  misc_feature (11)..(11): n is 5-[N-(1-naphthylmethyl)carboxyamide]-2'-deoxyuridine
  misc_feature (13)..(13): n is 5-[N-(1-naphthylmethyl)carboxyamide]-2'-deoxyuridine
  misc_feature (19)..(19): n is 5-[N-(1-naphthylmethyl)carboxyamide]-2'-deoxyuridine
  misc_feature (21)..(21): n is 5-[N-(1-naphthylmethyl)carboxyamide]-2'-deoxyuridine
  misc_feature (22)..(22): n is hexaethylene glycol
  misc_feature (31)..(31): n is 5-[N-(1-naphthylmethyl)carboxyamide]-2'-deoxyuridine
  misc_feature (33)..(33): n is 5-[N-(1-naphthylmethyl)carboxyamide]-2'-deoxyuridine
  misc_feature (35)..(35): n is 5-[N-(1-naphthylmethyl)carboxyamide]-2'-deoxyuridine
  misc_feature (41)..(41): n is 5-[N-(1-naphthylmethyl)carboxyamide]-2'-deoxyuridine
  misc_feature (43)..(43): n is 5-[N-(1-naphthylmethyl)carboxyamide]-2'-deoxyuridine
cgacagcangnangcacancnncgacagcangnangcacancn

SEQ ID NO: 720 - DNA, 44 bp, Artificial Sequence
  Synthetic
  misc_feature (9)..(9): n is 5-[N-(1-naphthylmethyl)carboxyamide]-2'-deoxyuridine
  misc_feature (11)..(11): n is 5-[N-(1-naphthylmethyl)carboxyamide]-2'-deoxyuridine
  misc_feature (13)..(13): n is 5-[N-(1-naphthylmethyl)carboxyamide]-2'-deoxyuridine
  misc_feature (19)..(19): n is 5-[N-(1-naphthylmethyl)carboxyamide]-2'-deoxyuridine
  misc_feature (21)..(21): n is 5-[N-(1-naphthylmethyl)carboxyamide]-2'-deoxyuridine
  misc_feature (22)..(23): n is hexaethylene glycol
  misc_feature (32)..(32): n is 5-[N-(1-naphthylmethyl)carboxyamide]-2'-deoxyuridine
  misc_feature (34)..(34): n is 5-[N-(1-naphthylmethyl)carboxyamide]-2'-deoxyuridine
  misc_feature (36)..(36): n is 5-[N-(1-naphthylmethyl)carboxyamide]-2'-deoxyuridine
  misc_feature (42)..(42): n is 5-[N-(1-naphthylmethyl)carboxyamide]-2'-deoxyuridine
  misc_feature (44)..(44): n is 5-[N-(1-naphthylmethyl)carboxyamide]-2'-deoxyuridine
cgacagcangnangcacancnnncgacagcangnangcacancn

SEQ ID NO: 721 - DNA, 45 bp, Artificial Sequence
  Synthetic
  misc_feature (9)..(9): n is 5-[N-(1-naphthylmethyl)carboxyamide]-2'-deoxyuridine
  misc_feature (11)..(11): n is 5-[N-(1-naphthylmethyl)carboxyamide]-2'-deoxyuridine
  misc_feature (13)..(13): n is 5-[N-(1-naphthylmethyl)carboxyamide]-2'-deoxyuridine
  misc_feature (19)..(19): n is 5-[N-(1-naphthylmethyl)carboxyamide]-2'-deoxyuridine
  misc_feature (21)..(21): n is 5-[N-(1-naphthylmethyl)carboxyamide]-2'-deoxyuridine
  misc_feature (22)..(24): n is hexaethylene glycol
  misc_feature (33)..(33): n is 5-[N-(1-naphthylmethyl)carboxyamide]-2'-deoxyuridine
  misc_feature (35)..(35): n is 5-[N-(1-naphthylmethyl)carboxyamide]-2'-deoxyuridine
  misc_feature (37)..(37): n is 5-[N-(1-naphthylmethyl)carboxyamide]-2'-deoxyuridine
  misc_feature (43)..(43): n is 5-[N-(1-naphthylmethyl)carboxyamide]-2'-deoxyuridine
  misc_feature (45)..(45): n is 5-[N-(1-naphthylmethyl)carboxyamide]-2'-deoxyuridine
cgacagcangnangcacancnnnncgacagcangnangcacancn

SEQ ID NO: 722 - DNA, 46 bp, Artificial Sequence
  Synthetic
  misc_feature (9)..(9): n is 5-[N-(1-naphthylmethyl)carboxyamide]-2'-deoxyuridine
  misc_feature (11)..(11): n is 5-[N-(1-naphthylmethyl)carboxyamide]-2'-deoxyuridine
  misc_feature (13)..(13): n is 5-[N-(1-naphthylmethyl)carboxyamide]-2'-deoxyuridine
  misc_feature (19)..(19): n is 5-[N-(1-naphthylmethyl)carboxyamide]-2'-deoxyuridine
  misc_feature (21)..(21): n is 5-[N-(1-naphthylmethyl)carboxyamide]-2'-deoxyuridine
  misc_feature (22)..(25): n is hexaethylene glycol
  misc_feature (34)..(34): n is 5-[N-(1-naphthylmethyl)carboxyamide]-2'-deoxyuridine
  misc_feature (36)..(36): n is 5-[N-(1-naphthylmethyl)carboxyamide]-2'-deoxyuridine
  misc_feature (38)..(38): n is 5-[N-(1-naphthylmethyl)carboxyamide]-2'-deoxyuridine
  misc_feature (44)..(44): n is 5-[N-(1-naphthylmethyl)carboxyamide]-2'-deoxyuridine
  misc_feature (46)..(46): n is 5-[N-(1-naphthylmethyl)carboxyamide]-2'-deoxyuridine
cgacagcangnangcacancnnnnncgacagcangnangcacancn

SEQ ID NO: 723 - DNA, 47 bp, Artificial Sequence
  Synthetic
  misc_feature (9)..(9): n is 5-[N-(1-naphthylmethyl)carboxyamide]-2'-deoxyuridine
  misc_feature (11)..(11): n is 5-[N-(1-naphthylmethyl)carboxyamide]-2'-deoxyuridine
  misc_feature (13)..(13): n is 5-[N-(1-naphthylmethyl)carboxyamide]-2'-deoxyuridine
  misc_feature (19)..(19): n is 5-[N-(1-naphthylmethyl)carboxyamide]-2'-deoxyuridine
  misc_feature (21)..(21): n is 5-[N-(1-naphthylmethyl)carboxyamide]-2'-deoxyuridine
  misc_feature (22)..(26): n is hexaethylene glycol
  misc_feature (35)..(35): n is 5-[N-(1-naphthylmethyl)carboxyamide]-2'-deoxyuridine
  misc_feature (37)..(37): n is 5-[N-(1-naphthylmethyl)carboxyamide]-2'-deoxyuridine
  misc_feature (39)..(39): n is 5-[N-(1-naphthylmethyl)carboxyamide]-2'-deoxyuridine
  misc_feature (45)..(45): n is 5-[N-(1-naphthylmethyl)carboxyamide]-2'-deoxyuridine
  misc_feature (47)..(47): n is 5-[N-(1-naphthylmethyl)carboxyamide]-2'-deoxyuridine
cgacagcangnangcacancnnnnnncgacagcangnangcacancn

SEQ ID NO: 724 - DNA, 48 bp, Artificial Sequence
  Synthetic
  misc_feature (9)..(9): n is 5-[N-(1-naphthylmethyl)carboxyamide]-2'-deoxyuridine
  misc_feature (11)..(11): n is 5-[N-(1-naphthylmethyl)carboxyamide]-2'-deoxyuridine
  misc_feature (13)..(13): n is 5-[N-(1-naphthylmethyl)carboxyamide]-2'-deoxyuridine
  misc_feature (19)..(19): n is 5-[N-(1-naphthylmethyl)carboxyamide]-2'-deoxyuridine
  misc_feature (21)..(21): n is 5-[N-(1-naphthylmethyl)carboxyamide]-2'-deoxyuridine
  misc_feature (22)..(27): n is hexaethylene glycol
  misc_feature (36)..(36): n is 5-[N-(1-naphthylmethyl)carboxyamide]-2'-deoxyuridine
  misc_feature (38)..(38): n is 5-[N-(1-naphthylmethyl)carboxyamide]-2'-deoxyuridine
  misc_feature (40)..(40): n is 5-[N-(1-naphthylmethyl)carboxyamide]-2'-deoxyuridine
  misc_feature (46)..(46): n is 5-[N-(1-naphthylmethyl)carboxyamide]-2'-deoxyuridine
  misc_feature (48)..(48): n is 5-[N-(1-naphthylmethyl)carboxyamide]-2'-deoxyuridine
cgacagcangnangcacancnnnnnnncgacagcangnangcacancn

SEQ ID NO: 725 - DNA, 42 bp, Artificial Sequence
  Synthetic
  misc_feature (9)..(9): n is 5-[N-(1-naphthylmethyl)carboxyamide]-2'-deoxyuridine
  misc_feature (11)..(11): n is 5-[N-(1-naphthylmethyl)carboxyamide]-2'-deoxyuridine
  misc_feature (13)..(13): n is 5-[N-(1-naphthylmethyl)carboxyamide]-2'-deoxyuridine
  misc_feature (19)..(19): n is 5-[N-(1-naphthylmethyl)carboxyamide]-2'-deoxyuridine
  misc_feature (21)..(22): n is 5-[N-(1-naphthylmethyl)carboxyamide]-2'-deoxyuridine
  misc_feature (24)..(24): n is 5-[N-(1-naphthylmethyl)carboxyamide]-2'-deoxyuridine
  misc_feature (30)..(30): n is 5-[N-(1-naphthylmethyl)carboxyamide]-2'-deoxyuridine
  misc_feature (32)..(32): n is 5-[N-(1-naphthylmethyl)carboxyamide]-2'-deoxyuridine
  misc_feature (34)..(34): n is 5-[N-(1-naphthylmethyl)carboxyamide]-2'-deoxyuridine
cgacagcangnangcacancnncnacacgnangnacgacagc

SEQ ID NO: 726 - DNA, 44 bp, Artificial Sequence
  Synthetic
  misc_feature (9)..(9): n is 5-[N-(1-naphthylmethyl)carboxyamide]-2'-deoxyuridine
  misc_feature (11)..(11): n is 5-[N-(1-naphthylmethyl)carboxyamide]-2'-deoxyuridine
  misc_feature (13)..(13): n is 5-[N-(1-naphthylmethyl)carboxyamide]-2'-deoxyuridine
  misc_feature (19)..(19): n is 5-[N-(1-naphthylmethyl)carboxyamide]-2'-deoxyuridine
  misc_feature (21)..(21): n is 5-[N-(1-naphthylmethyl)carboxyamide]-2'-deoxyuridine
  misc_feature (22)..(23): n is hexaethylene glycol
  misc_feature (24)..(24): n is 5-[N-(1-naphthylmethyl)carboxyamide]-2'-deoxyuridine
  misc_feature (26)..(26): n is 5-[N-(1-naphthylmethyl)carboxyamide]-2'-deoxyuridine
  misc_feature (32)..(32): n is 5-[N-(1-naphthylmethyl)carboxyamide]-2'-deoxyuridine
  misc_feature (34)..(34): n is 5-[N-(1-naphthylmethyl)carboxyamide]-2'-deoxyuridine
  misc_feature (36)..(36): n is 5-[N-(1-naphthylmethyl)carboxyamide]-2'-deoxyuridine
cgacagcangnangcacancnnnncnacacgnangnacgacagc

SEQ ID NO: 727 - DNA, 46 bp, Artificial Sequence
  Synthetic
  misc_feature (9)..(9): n is 5-[N-(1-naphthylmethyl)carboxyamide]-2'-deoxyuridine
  misc_feature (11)..(11): n is 5-[N-(1-naphthylmethyl)carboxyamide]-2'-deoxyuridine
  misc_feature (13)..(13): n is 5-[N-(1-naphthylmethyl)carboxyamide]-2'-deoxyuridine
  misc_feature (19)..(19): n is 5-[N-(1-naphthylmethyl)carboxyamide]-2'-deoxyuridine
  misc_feature (21)..(21): n is 5-[N-(1-naphthylmethyl)carboxyamide]-2'-deoxyuridine
  misc_feature (22)..(25): n is hexaethylene glycol
  misc_feature (26)..(26): n is 5-[N-(1-naphthylmethyl)carboxyamide]-2'-deoxyuridine
  misc_feature (28)..(28): n is 5-[N-(1-naphthylmethyl)carboxyamide]-2'-deoxyuridine
  misc_feature (34)..(34): n is 5-[N-(1-naphthylmethyl)carboxyamide]-2'-deoxyuridine
  misc_feature (36)..(36): n is 5-[N-(1-naphthylmethyl)carboxyamide]-2'-deoxyuridine
  misc_feature (38)..(38): n is 5-[N-(1-naphthylmethyl)carboxyamide]-2'-deoxyuridine
cgacagcangnangcacancnnnnnncnacacgnangnacgacagc

SEQ ID NO: 728 - DNA, 48 bp, Artificial Sequence
  Synthetic
  misc_feature (9)..(9): n is 5-[N-(1-naphthylmethyl)carboxyamide]-2'-deoxyuridine
  misc_feature (11)..(11): n is 5-[N-(1-naphthylmethyl)carboxyamide]-2'-deoxyuridine
  misc_feature (13)..(13): n is 5-[N-(1-naphthylmethyl)carboxyamide]-2'-deoxyuridine
  misc_feature (19)..(19): n is 5-[N-(1-naphthylmethyl)carboxyamide]-2'-deoxyuridine
  misc_feature (21)..(21): n is 5-[N-(1-naphthylmethyl)carboxyamide]-2'-deoxyuridine
  misc_feature (22)..(27): n is hexaethylene glycol
  misc_feature (28)..(28): n is 5-[N-(1-naphthylmethyl)carboxyamide]-2'-deoxyuridine
  misc_feature (30)..(30): n is 5-[N-(1-naphthylmethyl)carboxyamide]-2'-deoxyuridine
  misc_feature (36)..(36): n is 5-[N-(1-naphthylmethyl)carboxyamide]-2'-deoxyuridine
  misc_feature (38)..(38): n is 5-[N-(1-naphthylmethyl)carboxyamide]-2'-deoxyuridine
  misc_feature (40)..(40): n is 5-[N-(1-naphthylmethyl)carboxyamide]-2'-deoxyuridine
cgacagcangnangcacancnnnnnnnncnacacgnangnacgacagc

SEQ ID NO: 729 - DNA, 58 bp, Artificial Sequence
  Synthetic
  misc_feature (4)..(5): n is 5-[N-(1-naphthylmethyl)carboxyamide]-2'-deoxyuridine
  misc_feature (6)..(6): n is 2'-O-methyl-cytidine
  misc_feature (9)..(9): n is 2'-O-methyl-guanosine
  misc_feature (10)..(10): n is 5-[N-(1-naphthylmethyl)carboxyamide]-2'-deoxyuridine
  misc_feature (12)..(12): n is 2'-O-methyl-cytidine
  misc_feature (13)..(14): n is 5-[N-(1-naphthylmethyl)carboxyamide]-2'-deoxyuridine
  misc_feature (15)..(15): n is 2'-O-methyl-guanosine
  misc_feature (16)..(16): n is 5-[N-(1-naphthylmethyl)carboxyamide]-2'-deoxyuridine
  misc_feature (17)..(17): n is 2'-O-methyl-adenosine
  misc_feature (18)..(18): n is 2'-O-methyl-guanosine
  misc_feature (21)..(21): n is 5-[N-(1-naphthylmethyl)carboxyamide]-2'-deoxyuridine
  misc_feature (22)..(22): n is 5-[N-(1-naphthylmethyl)carboxyamide]-2'- O-methyl-uridine
  misc_feature (23)..(23): n is 5-[N-(1-naphthylmethyl)carboxyamide]-2'-deoxyuridine
  misc_feature (27)..(27): n is 5-[N-(1-naphthylmethyl)carboxyamide]-2'-deoxyuridine
  misc_feature (28)..(29): n is 2'-O-methyl-guanosine
  misc_feature (33)..(34): n is 5-[N-(1-naphthylmethyl)carboxyamide]-2'-deoxyuridine
  misc_feature (35)..(35): n is 2'-O-methyl-cytidine
  misc_feature (38)..(38): n is 2'-O-methyl-guanosine
  misc_feature (39)..(39): n is 5-[N-(1-naphthylmethyl)carboxyamide]-2'-deoxyuridine
  misc_feature (41)..(41): n is 2'-O-methyl-cytidine
  misc_feature (42)..(43): n is 5-[N-(1-naphthylmethyl)carboxyamide]-2'-deoxyuridine
  misc_feature (44)..(44): n is 2'-O-methyl-guanosine
  misc_feature (45)..(45): n is 5-[N-(1-naphthylmethyl)carboxyamide]-2'-deoxyuridine
  misc_feature (46)..(46): n is 2'-O-methyl-adenosine
  misc_feature (47)..(47): n is 2'-O-methyl-guanosine
  misc_feature (50)..(50): n is 5-[N-(1-naphthylmethyl)carboxyamide]-2'-deoxyuridine
  misc_feature (51)..(51): n is 5-[N-(1-naphthylmethyl)carboxyamide]-2'- O-methyl-uridine
  misc_feature (52)..(52): n is 5-[N-(1-naphthylmethyl)carboxyamide]-2'-deoxyuridine
  misc_feature (56)..(56): n is 5-[N-(1-naphthylmethyl)carboxyamide]-2'-deoxyuridine
  misc_feature (57)..(58): n is 2'-O-methyl-guanosine
ccgnnnaanngnnnnnnngannnaaannnccgnnnaanngnnnnnnngannnaaannn

SEQ ID NO: 730 - DNA, 59 bp, Artificial Sequence
  Synthetic
  misc_feature (4)..(5): n is 5-[N-(1-naphthylmethyl)carboxyamide]-2'-deoxyuridine
  misc_feature (6)..(6): n is 2'-O-methyl-cytidine
  misc_feature (9)..(9): n is 2'-O-methyl-guanosine
  misc_feature (10)..(10): n is 5-[N-(1-naphthylmethyl)carboxyamide]-2'-deoxyuridine
  misc_feature (12)..(12): n is 2'-O-methyl-cytidine
  misc_feature (13)..(14): n is 5-[N-(1-naphthylmethyl)carboxyamide]-2'-deoxyuridine
  misc_feature (15)..(15): n is 2'-O-methyl-guanosine
  misc_feature (16)..(16): n is 5-[N-(1-naphthylmethyl)carboxyamide]-2'-deoxyuridine
  misc_feature (17)..(17): n is 2'-O-methyl-adenosine
  misc_feature (18)..(18): n is 2'-O-methyl-guanosine
  misc_feature (21)..(21): n is 5-[N-(1-naphthylmethyl)carboxyamide]-2'-deoxyuridine
  misc_feature (22)..(22): n is 5-[N-(1-naphthylmethyl)carboxyamide]-2'- O-methyl-uridine
  misc_feature (23)..(23): n is 5-[N-(1-naphthylmethyl)carboxyamide]-2'-deoxyuridine
  misc_feature (27)..(27): n is 5-[N-(1-naphthylmethyl)carboxyamide]-2'-deoxyuridine
  misc_feature (28)..(29): n is 2'-O-methyl-guanosine
  misc_feature (30)..(30): n is hexaethylene glycol
  misc_feature (34)..(35): n is 5-[N-(1-naphthylmethyl)carboxyamide]-2'-deoxyuridine
  misc_feature (36)..(36): n is 2'-O-methyl-cytidine
  misc_feature (39)..(39): n is 2'-O-methyl-guanosine
  misc_feature (40)..(40): n is 5-[N-(1-naphthylmethyl)carboxyamide]-2'-deoxyuridine
  misc_feature (42)..(42): n is 2'-O-methyl-cytidine
  misc_feature (43)..(44): n is 5-[N-(1-naphthylmethyl)carboxyamide]-2'-deoxyuridine
  misc_feature (45)..(45): n is 2'-O-methyl-guanosine
  misc_feature (46)..(46): n is 5-[N-(1-naphthylmethyl)carboxyamide]-2'-deoxyuridine
  misc_feature (47)..(47): n is 2'-O-methyl-adenosine
  misc_feature (48)..(48): n is 2'-O-methyl-guanosine
  misc_feature (51)..(51): n is 5-[N-(1-naphthylmethyl)carboxyamide]-2'-deoxyuridine
  misc_feature (52)..(52): n is 5-[N-(1-naphthylmethyl)carboxyamide]-2'- O-methyl-uridine
  misc_feature (53)..(53): n is 5-[N-(1-naphthylmethyl)carboxyamide]-2'-deoxyuridine
  misc_feature (57)..(57): n is 5-[N-(1-naphthylmethyl)carboxyamide]-2'-deoxyuridine
  misc_feature (58)..(59): n is 2'-O-methyl-guanosine
ccgnnnaanngnnnnnnngannnaaannnnccgnnnaanngnnnnnnngannnaaannn

SEQ ID NO: 731 - DNA, 60 bp, Artificial Sequence
  Synthetic
  misc_feature (4)..(5): n is 5-[N-(1-naphthylmethyl)carboxyamide]-2'-deoxyuridine
  misc_feature (6)..(6): n is 2'-O-methyl-cytidine
  misc_feature (9)..(9): n is 2'-O-methyl-guanosine
  misc_feature (10)..(10): n is 5-[N-(1-naphthylmethyl)carboxyamide]-2'-deoxyuridine
  misc_feature (12)..(12): n is 2'-O-methyl-cytidine
  misc_feature (13)..(14): n is 5-[N-(1-naphthylmethyl)carboxyamide]-2'-deoxyuridine
  misc_feature (15)..(15): n is 2'-O-methyl-guanosine
  misc_feature (16)..(16): n is 5-[N-(1-naphthylmethyl)carboxyamide]-2'-deoxyuridine
  misc_feature (17)..(17): n is 2'-O-methyl-adenosine
  misc_feature (18)..(18): n is 2'-O-methyl-guanosine
  misc_feature (21)..(21): n is 5-[N-(1-naphthylmethyl)carboxyamide]-2'-deoxyuridine
  misc_feature (22)..(22): n is 5-[N-(1-naphthylmethyl)carboxyamide]-2'- O-methyl-uridine
  misc_feature (23)..(23): n is 5-[N-(1-naphthylmethyl)carboxyamide]-2'-deoxyuridine
  misc_feature (27)..(27): n is 5-[N-(1-naphthylmethyl)carboxyamide]-2'-deoxyuridine
  misc_feature (28)..(29): n is 2'-O-methyl-guanosine
  misc_feature (30)..(31): n is hexaethylene glycol
  misc_feature (35)..(36): n is 5-[N-(1-naphthylmethyl)carboxyamide]-2'-deoxyuridine
  misc_feature (37)..(37): n is 2'-O-methyl-cytidine
  misc_feature (40)..(40): n is 2'-O-methyl-guanosine
  misc_feature (41)..(41): n is 5-[N-(1-naphthylmethyl)carboxyamide]-2'-deoxyuridine
  misc_feature (43)..(43): n is 2'-O-methyl-cytidine
  misc_feature (44)..(45): n is 5-[N-(1-naphthylmethyl)carboxyamide]-2'-deoxyuridine
  misc_feature (46)..(46): n is 2'-O-methyl-guanosine
  misc_feature (47)..(47): n is 5-[N-(1-naphthylmethyl)carboxyamide]-2'-deoxyuridine
  misc_feature (48)..(48): n is 2'-O-methyl-adenosine
  misc_feature (49)..(49): n is 2'-O-methyl-guanosine
  misc_feature (52)..(52): n is 5-[N-(1-naphthylmethyl)carboxyamide]-2'-deoxyuridine
  misc_feature (53)..(53): n is 5-[N-(1-naphthylmethyl)carboxyamide]-2'- O-methyl-uridine
  misc_feature (54)..(54): n is 5-[N-(1-naphthylmethyl)carboxyamide]-2'-deoxyuridine
  misc_feature (58)..(58): n is 5-[N-(1-naphthylmethyl)carboxyamide]-2'-deoxyuridine
  misc_feature (59)..(60): n is 2'-O-methyl-guanosine
ccgnnnaanngnnnnnnngannnaaannnnnccgnnnaanngnnnnnnngannnaaannn

SEQ ID NO: 732 - DNA, 61 bp, Artificial Sequence
  Synthetic
  misc_feature (4)..(5): n is 5-[N-(1-naphthylmethyl)carboxyamide]-2'-deoxyuridine
  misc_feature (6)..(6): n is 2'-O-methyl-cytidine
  misc_feature (9)..(9): n is 2'-O-methyl-guanosine
  misc_feature (10)..(10): n is 5-[N-(1-naphthylmethyl)carboxyamide]-2'-deoxyuridine
  misc_feature (12)..(12): n is 2'-O-methyl-cytidine
  misc_feature (13)..(14): n is 5-[N-(1-naphthylmethyl)carboxyamide]-2'-deoxyuridine
  misc_feature (15)..(15): n is 2'-O-methyl-guanosine
  misc_feature (16)..(16): n is 5-[N-(1-naphthylmethyl)carboxyamide]-2'-deoxyuridine
  misc_feature (17)..(17): n is 2'-O-methyl-adenosine
  misc_feature (18)..(18): n is 2'-O-methyl-guanosine
  misc_feature (21)..(21): n is 5-[N-(1-naphthylmethyl)carboxyamide]-2'-deoxyuridine
  misc_feature (22)..(22): n is 5-[N-(1-naphthylmethyl)carboxyamide]-2'- O-methyl-uridine
  misc_feature (23)..(23): n is 5-[N-(1-naphthylmethyl)carboxyamide]-2'-deoxyuridine
  misc_feature (27)..(27): n is 5-[N-(1-naphthylmethyl)carboxyamide]-2'-deoxyuridine
  misc_feature (28)..(29): n is 2'-O-methyl-guanosine
  misc_feature (30)..(32): n is hexaethylene glycol
  misc_feature (36)..(37): n is 5-[N-(1-naphthylmethyl)carboxyamide]-2'-deoxyuridine
  misc_feature (38)..(38): n is 2'-O-methyl-cytidine
  misc_feature (41)..(41): n is 2'-O-methyl-guanosine
  misc_feature (42)..(42): n is 5-[N-(1-naphthylmethyl)carboxyamide]-2'-deoxyuridine
  misc_feature (44)..(44): n is 2'-O-methyl-cytidine
  misc_feature (45)..(46): n is 5-[N-(1-naphthylmethyl)carboxyamide]-2'-deoxyuridine
  misc_feature (47)..(47): n is 2'-O-methyl-guanosine
  misc_feature (48)..(48): n is 5-[N-(1-naphthylmethyl)carboxyamide]-2'-deoxyuridine
  misc_feature (49)..(49): n is 2'-O-methyl-adenosine
  misc_feature (50)..(50): n is 2'-O-methyl-guanosine
  misc_feature (53)..(53): n is 5-[N-(1-naphthylmethyl)carboxyamide]-2'-deoxyuridine
  misc_feature (54)..(54): n is 5-[N-(1-naphthylmethyl)carboxyamide]-2'- O-methyl-uridine
  misc_feature (55)..(55): n is 5-[N-(1-naphthylmethyl)carboxyamide]-2'-deoxyuridine
  misc_feature (59)..(59): n is 5-[N-(1-naphthylmethyl)carboxyamide]-2'-deoxyuridine
  misc_feature (60)..(61): n is 2'-O-methyl-guanosine
ccgnnnaanngnnnnnnngannnaaannnnnnccgnnnaanngnnnnnnngannnaaannn

SEQ ID NO: 733 - DNA, 62 bp, Artificial Sequence
  Synthetic
  misc_feature (4)..(5): n is 5-[N-(1-naphthylmethyl)carboxyamide]-2'-deoxyuridine
  misc_feature (6)..(6): n is 2'-O-methyl-cytidine
  misc_feature (9)..(9): n is 2'-O-methyl-guanosine
  misc_feature (10)..(10): n is 5-[N-(1-naphthylmethyl)carboxyamide]-2'-deoxyuridine
  misc_feature (12)..(12): n is 2'-O-methyl-cytidine
  misc_feature (13)..(14): n is 5-[N-(1-naphthylmethyl)carboxyamide]-2'-deoxyuridine
  misc_feature (15)..(15): n is 2'-O-methyl-guanosine
  misc_feature (16)..(16): n is 5-[N-(1-naphthylmethyl)carboxyamide]-2'-deoxyuridine
  misc_feature (17)..(17): n is 2'-O-methyl-adenosine
  misc_feature (18)..(18): n is 2'-O-methyl-guanosine
  misc_feature (21)..(21): n is 5-[N-(1-naphthylmethyl)carboxyamide]-2'-deoxyuridine
  misc_feature (22)..(22): n is 5-[N-(1-naphthylmethyl)carboxyamide]-2'- O-methyl-uridine
  misc_feature (23)..(23): n is 5-[N-(1-naphthylmethyl)carboxyamide]-2'-deoxyuridine
  misc_feature (27)..(27): n is 5-[N-(1-naphthylmethyl)carboxyamide]-2'-deoxyuridine
  misc_feature (28)..(29): n is 2'-O-methyl-guanosine
  misc_feature (30)..(33): n is hexaethylene glycol
  misc_feature (37)..(38): n is 5-[N-(1-naphthylmethyl)carboxyamide]-2'-deoxyuridine
  misc_feature (39)..(39): n is 2'-O-methyl-cytidine
  misc_feature (42)..(42): n is 2'-O-methyl-guanosine
  misc_feature (43)..(43): n is 5-[N-(1-naphthylmethyl)carboxyamide]-2'-deoxyuridine
  misc_feature (45)..(45): n is 2'-O-methyl-cytidine
  misc_feature (46)..(47): n is 5-[N-(1-naphthylmethyl)carboxyamide]-2'-deoxyuridine
  misc_feature (48)..(48): n is 2'-O-methyl-guanosine
  misc_feature (49)..(49): n is 5-[N-(1-naphthylmethyl)carboxyamide]-2'-deoxyuridine
  misc_feature (50)..(50): n is 2'-O-methyl-adenosine
  misc_feature (51)..(51): n is 2'-O-methyl-guanosine
  misc_feature (54)..(54): n is 5-[N-(1-naphthylmethyl)carboxyamide]-2'-deoxyuridine
  misc_feature (55)..(55): n is 5-[N-(1-naphthylmethyl)carboxyamide]-2'- O-methyl-uridine
  misc_feature (56)..(56): n is 5-[N-(1-naphthylmethyl)carboxyamide]-2'-deoxyuridine
  misc_feature (60)..(60): n is 5-[N-(1-naphthylmethyl)carboxyamide]-2'-deoxyuridine
  misc_feature (61)..(62): n is 2'-O-methyl-guanosine
ccgnnnaanngnnnnnnngannnaaannnnnnnccgnnnaanngnnnnnnngannnaaannn

SEQ ID NO: 734 - DNA, 63 bp, Artificial Sequence
  Synthetic
  misc_feature (4)..(5): n is 5-[N-(1-naphthylmethyl)carboxyamide]-2'-deoxyuridine
  misc_feature (6)..(6): n is 2'-O-methyl-cytidine
  misc_feature (9)..(9): n is 2'-O-methyl-guanosine
  misc_feature (10)..(10): n is 5-[N-(1-naphthylmethyl)carboxyamide]-2'-deoxyuridine
  misc_feature (12)..(12): n is 2'-O-methyl-cytidine
  misc_feature (13)..(14): n is 5-[N-(1-naphthylmethyl)carboxyamide]-2'-deoxyuridine
  misc_feature (15)..(15): n is 2'-O-methyl-guanosine
  misc_feature (16)..(16): n is 5-[N-(1-naphthylmethyl)carboxyamide]-2'-deoxyuridine
  misc_feature (17)..(17): n is 2'-O-methyl-adenosine
  misc_feature (18)..(18): n is 2'-O-methyl-guanosine
  misc_feature (21)..(21): n is 5-[N-(1-naphthylmethyl)carboxyamide]-2'-deoxyuridine
  misc_feature (22)..(22): n is 5-[N-(1-naphthylmethyl)carboxyamide]-2'- O-methyl-uridine
  misc_feature (23)..(23): n is 5-[N-(1-naphthylmethyl)carboxyamide]-2'-deoxyuridine
  misc_feature (27)..(27): n is 5-[N-(1-naphthylmethyl)carboxyamide]-2'-deoxyuridine
  misc_feature (28)..(29): n is 2'-O-methyl-guanosine
  misc_feature (30)..(34): n is hexaethylene glycol
  misc_feature (38)..(39): n is 5-[N-(1-naphthylmethyl)carboxyamide]-2'-deoxyuridine
  misc_feature (40)..(40): n is 2'-O-methyl-cytidine
  misc_feature (43)..(43): n is 2'-O-methyl-guanosine
  misc_feature (44)..(44): n is 5-[N-(1-naphthylmethyl)carboxyamide]-2'-deoxyuridine
  misc_feature (46)..(46): n is 2'-O-methyl-cytidine
  misc_feature (47)..(48): n is 5-[N-(1-naphthylmethyl)carboxyamide]-2'-deoxyuridine
  misc_feature (49)..(49): n is 2'-O-methyl-guanosine
  misc_feature (50)..(50): n is 5-[N-(1-naphthylmethyl)carboxyamide]-2'-deoxyuridine
  misc_feature (51)..(51): n is 2'-O-methyl-adenosine
  misc_feature (52)..(52): n is 2'-O-methyl-guanosine
  misc_feature (55)..(55): n is 5-[N-(1-naphthylmethyl)carboxyamide]-2'-deoxyuridine
  misc_feature (56)..(56): n is 5-[N-(1-naphthylmethyl)carboxyamide]-2'- O-methyl-uridine
  misc_feature (57)..(57): n is 5-[N-(1-naphthylmethyl)carboxyamide]-2'-deoxyuridine
  misc_feature (61)..(61): n is 5-[N-(1-naphthylmethyl)carboxyamide]-2'-deoxyuridine
  misc_feature (62)..(63): n is 2'-O-methyl-guanosine
ccgnnnaanngnnnnnnngannnaaannnnnnnnccgnnnaanngnnnnnnngannnaaannn

SEQ ID NO: 735 - DNA, 64 bp, Artificial Sequence
  Synthetic
  misc_feature (4)..(5): n is 5-[N-(1-naphthylmethyl)carboxyamide]-2'-deoxyuridine
  misc_feature (6)..(6): n is 2'-O-methyl-cytidine
  misc_feature (9)..(9): n is 2'-O-methyl-guanosine
  misc_feature (10)..(10): n is 5-[N-(1-naphthylmethyl)carboxyamide]-2'-deoxyuridine
  misc_feature (12)..(12): n is 2'-O-methyl-cytidine
  misc_feature (13)..(14): n is 5-[N-(1-naphthylmethyl)carboxyamide]-2'-deoxyuridine
  misc_feature (15)..(15): n is 2'-O-methyl-guanosine
  misc_feature (16)..(16): n is 5-[N-(1-naphthylmethyl)carboxyamide]-2'-deoxyuridine
  misc_feature (17)..(17): n is 2'-O-methyl-adenosine
  misc_feature (18)..(18): n is 2'-O-methyl-guanosine
  misc_feature (21)..(21): n is 5-[N-(1-naphthylmethyl)carboxyamide]-2'-deoxyuridine
  misc_feature (22)..(22): n is 5-[N-(1-naphthylmethyl)carboxyamide]-2'- O-methyl-uridine
  misc_feature (23)..(23): n is 5-[N-(1-naphthylmethyl)carboxyamide]-2'-deoxyuridine
  misc_feature (27)..(27): n is 5-[N-(1-naphthylmethyl)carboxyamide]-2'-deoxyuridine
  misc_feature (28)..(29): n is 2'-O-methyl-guanosine
  misc_feature (30)..(35): n is hexaethylene glycol
  misc_feature (39)..(40): n is 5-[N-(1-naphthylmethyl)carboxyamide]-2'-deoxyuridine
  misc_feature (41)..(41): n is 2'-O-methyl-cytidine
  misc_feature (44)..(44): n is 2'-O-methyl-guanosine
  misc_feature (45)..(45): n is 5-[N-(1-naphthylmethyl)carboxyamide]-2'-deoxyuridine
  misc_feature (47)..(47): n is 2'-O-methyl-cytidine
  misc_feature (48)..(49): n is 5-[N-(1-naphthylmethyl)carboxyamide]-2'-deoxyuridine
  misc_feature (50)..(50): n is 2'-O-methyl-guanosine
  misc_feature (51)..(51): n is 5-[N-(1-naphthylmethyl)carboxyamide]-2'-deoxyuridine
  misc_feature (52)..(52): n is 2'-O-methyl-adenosine
  misc_feature (53)..(53): n is 2'-O-methyl-guanosine
  misc_feature (56)..(56): n is 5-[N-(1-naphthylmethyl)carboxyamide]-2'-deoxyuridine
  misc_feature (57)..(57): n is 5-[N-(1-naphthylmethyl)carboxyamide]-2'- O-methyl-uridine
  misc_feature (58)..(58): n is 5-[N-(1-naphthylmethyl)carboxyamide]-2'-deoxyuridine
  misc_feature (62)..(62): n is 5-[N-(1-naphthylmethyl)carboxyamide]-2'-deoxyuridine
  misc_feature (63)..(64): n is 2'-O-methyl-guanosine
ccgnnnaanngnnnnnnngannnaaannnnnnnnnccgnnnaanngnnnnnnngannnaaannn

SEQ ID NO: 736 - DNA, 58 bp, Artificial Sequence
  Synthetic
  misc_feature (4)..(5): n is 5-[N-(1-naphthylmethyl)carboxyamide]-2'-deoxyuridine
  misc_feature (6)..(6): n is 2'-O-methyl-cytidine
  misc_feature (9)..(9): n is 2'-O-methyl-guanosine
  misc_feature (10)..(10): n is 5-[N-(1-naphthylmethyl)carboxyamide]-2'-deoxyuridine
  misc_feature (12)..(12): n is 2'-O-methyl-cytidine
  misc_feature (13)..(14): n is 5-[N-(1-naphthylmethyl)carboxyamide]-2'-deoxyuridine
  misc_feature (15)..(15): n is 2'-O-methyl-guanosine
  misc_feature (16)..(16): n is 5-[N-(1-naphthylmethyl)carboxyamide]-2'-deoxyuridine
  misc_feature (17)..(17): n is 2'-O-methyl-adenosine
  misc_feature (18)..(18): n is 2'-O-methyl-guanosine
  misc_feature (21)..(21): n is 5-[N-(1-naphthylmethyl)carboxyamide]-2'-deoxyuridine
  misc_feature (22)..(22): n is 5-[N-(1-naphthylmethyl)carboxyamide]-2'- O-methyl-uridine
  misc_feature (23)..(23): n is 5-[N-(1-naphthylmethyl)carboxyamide]-2'-deoxyuridine
  misc_feature (27)..(27): n is 5-[N-(1-naphthylmethyl)carboxyamide]-2'-deoxyuridine
  misc_feature (28)..(31): n is 2'-O-methyl-guanosine
  misc_feature (32)..(32): n is 5-[N-(1-naphthylmethyl)carboxyamide]-2'-deoxyuridine
  misc_feature (36)..(36): n is 5-[N-(1-naphthylmethyl)carboxyamide]-2'-deoxyuridine
  misc_feature (37)..(37): n is 5-[N-(1-naphthylmethyl)carboxyamide]-2'- O-methyl-uridine
  misc_feature (38)..(38): n is 5-[N-(1-naphthylmethyl)carboxyamide]-2'-deoxyuridine
  misc_feature (41)..(41): n is 2'-O-methyl-guanosine
  misc_feature (42)..(42): n is 2'-O-methyl-adenosine
  misc_feature (43)..(43): n is 5-[N-(1-naphthylmethyl)carboxyamide]-2'-deoxyuridine
  misc_feature (44)..(44): n is 2'-O-methyl-guanosine
  misc_feature (45)..(46): n is 5-[N-(1-naphthylmethyl)carboxyamide]-2'-deoxyuridine
  misc_feature (47)..(47): n is 2'-O-methyl-cytidine
  misc_feature (49)..(49): n is 5-[N-(1-naphthylmethyl)carboxyamide]-2'-deoxyuridine
  misc_feature (50)..(50): n is 2'-O-methyl-guanosine
  misc_feature (53)..(53): n is 2'-O-methyl-cytidine
  misc_feature (54)..(55): n is 5-[N-(1-naphthylmethyl)carboxyamide]-2'-deoxyuridine
ccgnnnaanngnnnnnnngannnaaannnnnnaaannnagnnnnnnngnnaannngcc

SEQ ID NO: 737 - DNA, 60 bp, Artificial Sequence
  Synthetic
  misc_feature (4)..(5): n is 5-[N-(1-naphthylmethyl)carboxyamide]-2'-deoxyuridine
  misc_feature (6)..(6): n is 2'-O-methyl-cytidine
  misc_feature (9)..(9): n is 2'-O-methyl-guanosine
  misc_feature (10)..(10): n is 5-[N-(1-naphthylmethyl)carboxyamide]-2'-deoxyuridine
  misc_feature (12)..(12): n is 2'-O-methyl-cytidine
  misc_feature (13)..(14): n is 5-[N-(1-naphthylmethyl)carboxyamide]-2'-deoxyuridine
  misc_feature (15)..(15): n is 2'-O-methyl-guanosine
  misc_feature (16)..(16): n is 5-[N-(1-naphthylmethyl)carboxyamide]-2'-deoxyuridine
  misc_feature (17)..(17): n is 2'-O-methyl-adenosine
  misc_feature (18)..(18): n is 2'-O-methyl-guanosine
  misc_feature (21)..(21): n is 5-[N-(1-naphthylmethyl)carboxyamide]-2'-deoxyuridine
  misc_feature (22)..(22): n is 5-[N-(1-naphthylmethyl)carboxyamide]-2'- O-methyl-uridine
  misc_feature (23)..(23): n is 5-[N-(1-naphthylmethyl)carboxyamide]-2'-deoxyuridine
  misc_feature (27)..(27): n is 5-[N-(1-naphthylmethyl)carboxyamide]-2'-deoxyuridine
  misc_feature (28)..(29): n is 2'-O-methyl-guanosine
  misc_feature (30)..(31): n is hexaethylene glycol
  misc_feature (32)..(33): n is 2'-O-methyl-guanosine
  misc_feature (34)..(34): n is 5-[N-(1-naphthylmethyl)carboxyamide]-2'-deoxyuridine
  misc_feature (38)..(38): n is 5-[N-(1-naphthylmethyl)carboxyamide]-2'-deoxyuridine
  misc_feature (39)..(39): n is 5-[N-(1-naphthylmethyl)carboxyamide]-2'- O-methyl-uridine
  misc_feature (40)..(40): n is 5-[N-(1-naphthylmethyl)carboxyamide]-2'-deoxyuridine
  misc_feature (43)..(43): n is 2'-O-methyl-guanosine
  misc_feature (44)..(44): n is 2'-O-methyl-adenosine
  misc_feature (45)..(45): n is 5-[N-(1-naphthylmethyl)carboxyamide]-2'-deoxyuridine
  misc_feature (46)..(46): n is 2'-O-methyl-guanosine
  misc_feature (47)..(48): n is 5-[N-(1-naphthylmethyl)carboxyamide]-2'-deoxyuridine
  misc_feature (49)..(49): n is 2'-O-methyl-cytidine
  misc_feature (51)..(51): n is 5-[N-(1-naphthylmethyl)carboxyamide]-2'-deoxyuridine
  misc_feature (52)..(52): n is 2'-O-methyl-guanosine
  misc_feature (55)..(55): n is 2'-O-methyl-cytidine
  misc_feature (56)..(57): n is 5-[N-(1-naphthylmethyl)carboxyamide]-2'-deoxyuridine
ccgnnnaanngnnnnnnngannnaaannnnnnnnaaannnagnnnnnnngnnaannngcc

SEQ ID NO: 738 - DNA, 62 bp, Artificial Sequence
  Synthetic
  misc_feature (4)..(5): n is 5-[N-(1-naphthylmethyl)carboxyamide]-2'-deoxyuridine
  misc_feature (6)..(6): n is 2'-O-methyl-cytidine
  misc_feature (9)..(9): n is 2'-O-methyl-guanosine
  misc_feature (10)..(10): n is 5-[N-(1-naphthylmethyl)carboxyamide]-2'-deoxyuridine
  misc_feature (12)..(12): n is 2'-O-methyl-cytidine
  misc_feature (13)..(14): n is 5-[N-(1-naphthylmethyl)carboxyamide]-2'-deoxyuridine
  misc_feature (15)..(15): n is 2'-O-methyl-guanosine
  misc_feature (16)..(16): n is 5-[N-(1-naphthylmethyl)carboxyamide]-2'-deoxyuridine
  misc_feature (17)..(17): n is 2'-O-methyl-adenosine
  misc_feature (18)..(18): n is 2'-O-methyl-guanosine
  misc_feature (21)..(21): n is 5-[N-(1-naphthylmethyl)carboxyamide]-2'-deoxyuridine
  misc_feature (22)..(22): n is 5-[N-(1-naphthylmethyl)carboxyamide]-2'- O-methyl-uridine
  misc_feature (23)..(23): n is 5-[N-(1-naphthylmethyl)carboxyamide]-2'-deoxyuridine
  misc_feature (27)..(27): n is 5-[N-(1-naphthylmethyl)carboxyamide]-2'-deoxyuridine
  misc_feature (28)..(29): n is 2'-O-methyl-guanosine
  misc_feature (30)..(33): n is hexaethylene glycol
  misc_feature (34)..(35): n is 2'-O-methyl-guanosine
  misc_feature (36)..(36): n is 5-[N-(1-naphthylmethyl)carboxyamide]-2'-deoxyuridine
  misc_feature (40)..(40): n is 5-[N-(1-naphthylmethyl)carboxyamide]-2'-deoxyuridine
  misc_feature (41)..(41): n is 5-[N-(1-naphthylmethyl)carboxyamide]-2'- O-methyl-uridine
  misc_feature (42)..(42): n is 5-[N-(1-naphthylmethyl)carboxyamide]-2'-deoxyuridine
  misc_feature (45)..(45): n is 2'-O-methyl-guanosine
  misc_feature (46)..(46): n is 2'-O-methyl-adenosine
  misc_feature (47)..(47): n is 5-[N-(1-naphthylmethyl)carboxyamide]-2'-deoxyuridine
  misc_feature (48)..(48): n is 2'-O-methyl-guanosine
  misc_feature (49)..(50): n is 5-[N-(1-naphthylmethyl)carboxyamide]-2'-deoxyuridine
  misc_feature (51)..(51): n is 2'-O-methyl-cytidine
  misc_feature (53)..(53): n is 5-[N-(1-naphthylmethyl)carboxyamide]-2'-deoxyuridine
  misc_feature (54)..(54): n is 2'-O-methyl-guanosine
  misc_feature (57)..(57): n is 2'-O-methyl-cytidine
  misc_feature (58)..(59): n is 5-[N-(1-naphthylmethyl)carboxyamide]-2'-deoxyuridine
ccgnnnaanngnnnnnnngannnaaannnnnnnnnnaaannnagnnnnnnngnnaannngcc

SEQ ID NO: 739 - DNA, 64 bp, Artificial Sequence
  Synthetic
  misc_feature (4)..(5): n is 5-[N-(1-naphthylmethyl)carboxyamide]-2'-deoxyuridine
  misc_feature (6)..(6): n is 2'-O-methyl-cytidine
  misc_feature (9)..(9): n is 2'-O-methyl-guanosine
  misc_feature (10)..(10): n is 5-[N-(1-naphthylmethyl)carboxyamide]-2'-deoxyuridine
  misc_feature (12)..(12): n is 2'-O-methyl-cytidine
  misc_feature (13)..(14): n is 5-[N-(1-naphthylmethyl)carboxyamide]-2'-deoxyuridine
  misc_feature (15)..(15): n is 2'-O-methyl-guanosine
  misc_feature (16)..(16): n is 5-[N-(1-naphthylmethyl)carboxyamide]-2'-deoxyuridine
  misc_feature (17)..(17): n is 2'-O-methyl-adenosine
  misc_feature (18)..(18): n is 2'-O-methyl-guanosine
  misc_feature (21)..(21): n is 5-[N-(1-naphthylmethyl)carboxyamide]-2'-deoxyuridine
  misc_feature (22)..(22): n is 5-[N-(1-naphthylmethyl)carboxyamide]-2'- O-methyl-uridine
  misc_feature (23)..(23): n is 5-[N-(1-naphthylmethyl)carboxyamide]-2'-deoxyuridine
  misc_feature (27)..(27): n is 5-[N-(1-naphthylmethyl)carboxyamide]-2'-deoxyuridine
  misc_feature (28)..(29): n is 2'-O-methyl-guanosine
  misc_feature (30)..(35): n is hexaethylene glycol
  misc_feature (36)..(37): n is 2'-O-methyl-guanosine
  misc_feature (38)..(38): n is 5-[N-(1-naphthylmethyl)carboxyamide]-2'-deoxyuridine
  misc_feature (42)..(42): n is 5-[N-(1-naphthylmethyl)carboxyamide]-2'-deoxyuridine
  misc_feature (43)..(43): n is 5-[N-(1-naphthylmethyl)carboxyamide]-2'- O-methyl-uridine
  misc_feature (44)..(44): n is 5-[N-(1-naphthylmethyl)carboxyamide]-2'-deoxyuridine
  misc_feature (47)..(47): n is 2'-O-methyl-guanosine
  misc_feature (48)..(48): n is 2'-O-methyl-adenosine
  misc_feature (49)..(49): n is 5-[N-(1-naphthylmethyl)carboxyamide]-2'-deoxyuridine
  misc_feature (50)..(50): n is 2'-O-methyl-guanosine
  misc_feature (51)..(52): n is 5-[N-(1-naphthylmethyl)carboxyamide]-2'-deoxyuridine
  misc_feature (53)..(53): n is 2'-O-methyl-cytidine
  misc_feature (55)..(55): n is 5-[N-(1-naphthylmethyl)carboxyamide]-2'-deoxyuridine
  misc_feature (56)..(56): n is 2'-O-methyl-guanosine
  misc_feature (59)..(59): n is 2'-O-methyl-cytidine
  misc_feature (60)..(61): n is 5-[N-(1-naphthylmethyl)carboxyamide]-2'-deoxyuridine
ccgnnnaanngnnnnnnngannnaaannnnnnnnnnnnaaannnagnnnnnnngnnaannngcc

SEQ ID NO: 740 - DNA, 52 bp, Artificial Sequence
  Synthetic
  misc_feature (4)..(5): n is 5-[N-(1-naphthylmethyl)carboxyamide]-2'-deoxyuridine
  misc_feature (10)..(10): n is 5-[N-(1-naphthylmethyl)carboxyamide]-2'-deoxyuridine
  misc_feature (13)..(14): n is 5-[N-(1-naphthylmethyl)carboxyamide]-2'-deoxyuridine
  misc_feature (15)..(15): n is 1,3-propane diol
  misc_feature (16)..(16): n is 5-[N-(1-naphthylmethyl)carboxyamide]-2'-deoxyuridine
  misc_feature (18)..(18): n is 1,3-propane diol
  misc_feature (21)..(23): n is 5-[N-(1-naphthylmethyl)carboxyamide]-2'-deoxyuridine
  misc_feature (27)..(27): n is 5-[N-(1-naphthylmethyl)carboxyamide]-2'-deoxyuridine
  misc_feature (30)..(31): n is 5-(N-benzylcarboxyamide)-2'-deoxyuridine
  misc_feature (32)..(32): n is 2'-O-methyl-adenosine
  misc_feature (34)..(34): n is hexaethylene glycol
  misc_feature (36)..(37): n is 5-(N-benzylcarboxyamide)-2'-deoxyuridine
  misc_feature (40)..(40): n is 2'-O-methyl-adenosine
  misc_feature (41)..(41): n is 2'-O-methyl-cytidine
  misc_feature (45)..(47): n is 5-(N-benzylcarboxyamide)-2'-deoxyuridine
  misc_feature (48)..(48): n is 2'-O-methyl-adenosine
  misc_feature (49)..(49): n is 5-(N-benzylcarboxyamide)-2'-deoxyuridine
  misc_feature (50)..(50): n is 2'-O-methyl-adenosine
ccgnncaagngcnnnnangannnaaanggnnncngnnacnngcgnnnnnngc

SEQ ID NO: 741 - DNA, 53 bp, Artificial Sequence
  Synthetic
  misc_feature (4)..(5): n is 5-[N-(1-naphthylmethyl)carboxyamide]-2'-deoxyuridine
  misc_feature (10)..(10): n is 5-[N-(1-naphthylmethyl)carboxyamide]-2'-deoxyuridine
  misc_feature (13)..(14): n is 5-[N-(1-naphthylmethyl)carboxyamide]-2'-deoxyuridine
  misc_feature (15)..(15): n is 1,3-propane diol
  misc_feature (16)..(16): n is 5-[N-(1-naphthylmethyl)carboxyamide]-2'-deoxyuridine
  misc_feature (18)..(18): n is 1,3-propane diol
  misc_feature (21)..(23): n is 5-[N-(1-naphthylmethyl)carboxyamide]-2'-deoxyuridine
  misc_feature (27)..(27): n is 5-[N-(1-naphthylmethyl)carboxyamide]-2'-deoxyuridine
  misc_feature (30)..(30): n is hexaethylene glycol
  misc_feature (31)..(32): n is 5-(N-benzylcarboxyamide)-2'-deoxyuridine
  misc_feature (33)..(33): n is 2'-O-methyl-adenosine
  misc_feature (35)..(35): n is hexaethylene glycol
  misc_feature (37)..(38): n is 5-(N-benzylcarboxyamide)-2'-deoxyuridine
  misc_feature (41)..(41): n is 2'-O-methyl-adenosine
  misc_feature (42)..(42): n is 2'-O-methyl-cytidine
  misc_feature (46)..(48): n is 5-(N-benzylcarboxyamide)-2'-deoxyuridine
  misc_feature (49)..(49): n is 2'-O-methyl-adenosine
  misc_feature (50)..(50): n is 5-(N-benzylcarboxyamide)-2'-deoxyuridine
  misc_feature (51)..(51): n is 2'-O-methyl-adenosine
ccgnncaagngcnnnnangannnaaanggnnnncngnnacnngcgnnnnnngc

SEQ ID NO: 742 - DNA, 54 bp, Artificial Sequence
  Synthetic
  misc_feature (4)..(5): n is 5-[N-(1-naphthylmethyl)carboxyamide]-2'-deoxyuridine
  misc_feature (10)..(10): n is 5-[N-(1-naphthylmethyl)carboxyamide]-2'-deoxyuridine
  misc_feature (13)..(14): n is 5-[N-(1-naphthylmethyl)carboxyamide]-2'-deoxyuridine
  misc_feature (15)..(15): n is 1,3-propane diol
  misc_feature (16)..(16): n is 5-[N-(1-naphthylmethyl)carboxyamide]-2'-deoxyuridine
  misc_feature (18)..(18): n is 1,3-propane diol
  misc_feature (21)..(23): n is 5-[N-(1-naphthylmethyl)carboxyamide]-2'-deoxyuridine
  misc_feature (27)..(27): n is 5-[N-(1-naphthylmethyl)carboxyamide]-2'-deoxyuridine
  misc_feature (30)..(31): n is hexaethylene glycol
  misc_feature (32)..(33): n is 5-(N-benzylcarboxyamide)-2'-deoxyuridine
  misc_feature (34)..(34): n is 2'-O-methyl-adenosine
  misc_feature (36)..(36): n is hexaethylene glycol
  misc_feature (38)..(39): n is 5-(N-benzylcarboxyamide)-2'-deoxyuridine
  misc_feature (42)..(42): n is 2'-O-methyl-adenosine
  misc_feature (43)..(43): n is 2'-O-methyl-cytidine
  misc_feature (47)..(49): n is 5-(N-benzylcarboxyamide)-2'-deoxyuridine
  misc_feature (50)..(50): n is 2'-O-methyl-adenosine
  misc_feature (51)..(51): n is 5-(N-benzylcarboxyamide)-2'-deoxyuridine
  misc_feature (52)..(52): n is 2'-O-methyl-adenosine
ccgnncaagngcnnnnangannnaaanggnnnnncngnnacnngcgnnnnnngc

SEQ ID NO: 743 - DNA, 55 bp, Artificial Sequence
  Synthetic
  misc_feature (4)..(5): n is 5-[N-(1-naphthylmethyl)carboxyamide]-2'-deoxyuridine
  misc_feature (10)..(10): n is 5-[N-(1-naphthylmethyl)carboxyamide]-2'-deoxyuridine
  misc_feature (13)..(14): n is 5-[N-(1-naphthylmethyl)carboxyamide]-2'-deoxyuridine
  misc_feature (15)..(15): n is 1,3-propane diol
  misc_feature (16)..(16): n is 5-[N-(1-naphthylmethyl)carboxyamide]-2'-deoxyuridine
  misc_feature (18)..(18): n is 1,3-propane diol
  misc_feature (21)..(23): n is 5-[N-(1-naphthylmethyl)carboxyamide]-2'-deoxyuridine
  misc_feature (27)..(27): n is 5-[N-(1-naphthylmethyl)carboxyamide]-2'-deoxyuridine
  misc_feature (30)..(32): n is hexaethylene glycol
  misc_feature (33)..(34): n is 5-(N-benzylcarboxyamide)-2'-deoxyuridine
  misc_feature (35)..(35): n is 2'-O-methyl-adenosine
  misc_feature (37)..(37): n is hexaethylene glycol
  misc_feature (39)..(40): n is 5-(N-benzylcarboxyamide)-2'-deoxyuridine
  misc_feature (43)..(43): n is 2'-O-methyl-adenosine
  misc_feature (44)..(44): n is 2'-O-methyl-cytidine
  misc_feature (48)..(50): n is 5-(N-benzylcarboxyamide)-2'-deoxyuridine
  misc_feature (51)..(51): n is 2'-O-methyl-adenosine
  misc_feature (52)..(52): n is 5-(N-benzylcarboxyamide)-2'-deoxyuridine
  misc_feature (53)..(53): n is 2'-O-methyl-adenosine
ccgnncaagngcnnnnangannnaaanggnnnnnncngnnacnngcgnnnnnngc

SEQ ID NO: 744 - DNA, 52 bp, Artificial Sequence
  Synthetic
  misc_feature (1)..(2): n is 5-(N-benzylcarboxyamide)-2'-deoxyuridine
  misc_feature (3)..(3): n is 2'-O-methyl-adenosine
  misc_feature (5)..(5): n is hexaethylene glycol
  misc_feature (7)..(8): n is 5-(N-benzylcarboxyamide)-2'-deoxyuridine
  misc_feature (11)..(11): n is 2'-O-methyl-adenosine
  misc_feature (12)..(12): n is 2'-O-methyl-cytidine
  misc_feature (16)..(18): n is 5-(N-benzylcarboxyamide)-2'-deoxyuridine
  misc_feature (19)..(19): n is 2'-O-methyl-adenosine
  misc_feature (20)..(20): n is 5-(N-benzylcarboxyamide)-2'-deoxyuridine
  misc_feature (21)..(21): n is 2'-O-methyl-adenosine
  misc_feature (24)..(24): n is 2'-O-methyl-guanosine
  misc_feature (28)..(29): n is 5-[N-(1-naphthylmethyl)carboxyamide]-2'-deoxyuridine
  misc_feature (34)..(34): n is 5-[N-(1-naphthylmethyl)carboxyamide]-2'-deoxyuridine
  misc_feature (37)..(38): n is 5-[N-(1-naphthylmethyl)carboxyamide]-2'-deoxyuridine
  misc_feature (39)..(39): n is 1,3-propane diol
  misc_feature (40)..(40): n is 5-[N-(1-naphthylmethyl)carboxyamide]-2'-deoxyuridine
  misc_feature (42)..(42): n is 1,3-propane diol
  misc_feature (45)..(47): n is 5-[N-(1-naphthylmethyl)carboxyamide]-2'-deoxyuridine
  misc_feature (51)..(51): n is 5-[N-(1-naphthylmethyl)carboxyamide]-2'-deoxyuridine
nnncngnnacnngcgnnnnnngcnccgnncaagngcnnnnangannnaaang

SEQ ID NO: 745 - DNA, 53 bp, Artificial Sequence
  Synthetic
  misc_feature (1)..(2): n is 5-(N-benzylcarboxyamide)-2'-deoxyuridine
  misc_feature (3)..(3): n is 2'-O-methyl-adenosine
  misc_feature (5)..(5): n is hexaethylene glycol
  misc_feature (7)..(8): n is 5-(N-benzylcarboxyamide)-2'-deoxyuridine
  misc_feature (11)..(11): n is 2'-O-methyl-adenosine
  misc_feature (12)..(12): n is 2'-O-methyl-cytidine
  misc_feature (16)..(18): n is 5-(N-benzylcarboxyamide)-2'-deoxyuridine
  misc_feature (19)..(19): n is 2'-O-methyl-adenosine
  misc_feature (20)..(20): n is 5-(N-benzylcarboxyamide)-2'-deoxyuridine
  misc_feature (21)..(21): n is 2'-O-methyl-adenosine
  misc_feature (24)..(24): n is 2'-O-methyl-guanosine
  misc_feature (25)..(25): n is hexaethylene glycol
  misc_feature (29)..(30): n is 5-[N-(1-naphthylmethyl)carboxyamide]-2'-deoxyuridine
  misc_feature (35)..(35): n is 5-[N-(1-naphthylmethyl)carboxyamide]-2'-deoxyuridine
  misc_feature (38)..(39): n is 5-[N-(1-naphthylmethyl)carboxyamide]-2'-deoxyuridine
  misc_feature (40)..(40): n is 1,3-propane diol
  misc_feature (41)..(41): n is 5-[N-(1-naphthylmethyl)carboxyamide]-2'-deoxyuridine
  misc_feature (43)..(43): n is 1,3-propane diol
  misc_feature (46)..(48): n is 5-[N-(1-naphthylmethyl)carboxyamide]-2'-deoxyuridine
  misc_feature (52)..(52): n is 5-[N-(1-naphthylmethyl)carboxyamide]-2'-deoxyuridine
nnncngnnacnngcgnnnnnngcnnccgnncaagngcnnnnangannnaaang

SEQ ID NO: 746 - DNA, 54 bp, Artificial Sequence
  Synthetic
  misc_feature (1)..(2): n is 5-(N-benzylcarboxyamide)-2'-deoxyuridine
  misc_feature (3)..(3): n is 2'-O-methyl-adenosine
  misc_feature (5)..(5): n is hexaethylene glycol
  misc_feature (7)..(8): n is 5-(N-benzylcarboxyamide)-2'-deoxyuridine
  misc_feature (11)..(11): n is 2'-O-methyl-adenosine
  misc_feature (12)..(12): n is 2'-O-methyl-cytidine
  misc_feature (16)..(18): n is 5-(N-benzylcarboxyamide)-2'-deoxyuridine
  misc_feature (19)..(19): n is 2'-O-methyl-adenosine
  misc_feature (20)..(20): n is 5-(N-benzylcarboxyamide)-2'-deoxyuridine
  misc_feature (21)..(21): n is 2'-O-methyl-adenosine
  misc_feature (24)..(24): n is 2'-O-methyl-guanosine
  misc_feature (25)..(26): n is hexaethylene glycol
  misc_feature (30)..(31): n is 5-[N-(1-naphthylmethyl)carboxyamide]-2'-deoxyuridine
  misc_feature (36)..(36): n is 5-[N-(1-naphthylmethyl)carboxyamide]-2'-deoxyuridine
  misc_feature (39)..(40): n is 5-[N-(1-naphthylmethyl)carboxyamide]-2'-deoxyuridine
  misc_feature (41)..(41): n is 1,3-propane diol
  misc_feature (42)..(42): n is 5-[N-(1-naphthylmethyl)carboxyamide]-2'-deoxyuridine
  misc_feature (44)..(44): n is 1,3-propane diol
  misc_feature (47)..(49): n is 5-[N-(1-naphthylmethyl)carboxyamide]-2'-deoxyuridine
  misc_feature (53)..(53): n is 5-[N-(1-naphthylmethyl)carboxyamide]-2'-deoxyuridine
nnncngnnacnngcgnnnnnngcnnnccgnncaagngcnnnnangannnaaang

SEQ ID NO: 747 - DNA, 55 bp, Artificial Sequence
  Synthetic
  misc_feature (1)..(2): n is 5-(N-benzylcarboxyamide)-2'-deoxyuridine
  misc_feature (3)..(3): n is 2'-O-methyl-adenosine
  misc_feature (5)..(5): n is hexaethylene glycol
  misc_feature (7)..(8): n is 5-(N-benzylcarboxyamide)-2'-deoxyuridine
  misc_feature (11)..(11): n is 2'-O-methyl-adenosine
  misc_feature (12)..(12): n is 2'-O-methyl-cytidine
  misc_feature (16)..(18): n is 5-(N-benzylcarboxyamide)-2'-deoxyuridine
  misc_feature (19)..(19): n is 2'-O-methyl-adenosine
  misc_feature (20)..(20): n is 5-(N-benzylcarboxyamide)-2'-deoxyuridine
  misc_feature (21)..(21): n is 2'-O-methyl-adenosine
  misc_feature (24)..(24): n is 2'-O-methyl-guanosine
  misc_feature (25)..(27): n is hexaethylene glycol
  misc_feature (31)..(32): n is 5-[N-(1-naphthylmethyl)carboxyamide]-2'-deoxyuridine
  misc_feature (37)..(37): n is 5-[N-(1-naphthylmethyl)carboxyamide]-2'-deoxyuridine
  misc_feature (40)..(41): n is 5-[N-(1-naphthylmethyl)carboxyamide]-2'-deoxyuridine
  misc_feature (42)..(42): n is 1,3-propane diol
  misc_feature (43)..(43): n is 5-[N-(1-naphthylmethyl)carboxyamide]-2'-deoxyuridine
  misc_feature (45)..(45): n is 1,3-propane diol
  misc_feature (48)..(50): n is 5-[N-(1-naphthylmethyl)carboxyamide]-2'-deoxyuridine
  misc_feature (54)..(54): n is 5-[N-(1-naphthylmethyl)carboxyamide]-2'-deoxyuridine
nnncngnnacnngcgnnnnnngcnnnnccgnncaagngcnnnnangannnaaang

SEQ ID NO: 748 - DNA, 56 bp, Artificial Sequence
  Synthetic
  misc_feature (1)..(1): n is 5-(N-benzylcarboxyamide)-2'-deoxyuridine
  misc_feature (2)..(2): n is 5-[N-(3,4-methylenedioxyphenyl-methyl)carboxyamide]-2'-deoxyuridi ne
  misc_feature (3)..(3): n is 2'-O-methyl-adenosine
  misc_feature (5)..(5): n is hexaethylene glycol
  misc_feature (7)..(7): n is 5-(N-benzylcarboxyamide)-2'-O-methyl-uridine
  misc_feature (8)..(8): n is 5-(N-benzylcarboxyamide)-2'-deoxyuridine
  misc_feature (11)..(11): n is 1,3-propane diol
  misc_feature (12)..(12): n is 2'-O-methyl-cytidine
  misc_feature (16)..(17): n is 5-(N-benzylcarboxyamide)-2'-deoxyuridine
  misc_feature (18)..(18): n is 5-(N-benzylcarboxyamide)-2'-O-methyl-uridine
  misc_feature (19)..(19): n is 2'-O-methyl-adenosine
  misc_feature (20)..(20): n is 5-(N-benzylcarboxyamide)-2'-deoxyuridine
  misc_feature (21)..(21): n is 2'-O-methyl-adenosine
  misc_feature (24)..(24): n is 2'-O-methyl-guanosine
  misc_feature (25)..(27): n is hexaethylene glycol
  misc_feature (31)..(32): n is 5-[N-(1-naphthylmethyl)carboxyamide]-2'-deoxyuridine
  misc_feature (33)..(33): n is 2'-O-methyl-cytidine
  misc_feature (36)..(36): n is 2'-O-methyl-guanosine
  misc_feature (37)..(37): n is 5-[N-(1-naphthylmethyl)carboxyamide]-2'-deoxyuridine
  misc_feature (39)..(39): n is 2'-O-methyl-cytidine
  misc_feature (40)..(41): n is 5-[N-(1-naphthylmethyl)carboxyamide]-2'-deoxyuridine
  misc_feature (42)..(42): n is 2'-O-methyl-guanosine
  misc_feature (43)..(43): n is 5-[N-(1-naphthylmethyl)carboxyamide]-2'-deoxyuridine
  misc_feature (44)..(44): n is 2'-O-methyl-adenosine
  misc_feature (45)..(45): n is 2'-O-methyl-guanosine
  misc_feature (48)..(48): n is 5-[N-(1-naphthylmethyl)carboxyamide]-2'-deoxyuridine
  misc_feature (49)..(49): n is 5-[N-(1-naphthylmethyl)carboxyamide]-2'- O-methyl-uridine
  misc_feature (50)..(50): n is 5-[N-(1-naphthylmethyl)carboxyamide]-2'-deoxyuridine
  misc_feature (54)..(54): n is 5-[N-(1-naphthylmethyl)carboxyamide]-2'-deoxyuridine
  misc_feature (55)..(56): n is 2'-O-methyl-guanosine
nnncngnnacnngcgnnnnnngcnnnnccgnnnaanngnnnnnnngannnaaannn

SEQ ID NO: 749 - DNA, 56 bp, Artificial Sequence
  Synthetic
  misc_feature (4)..(5): n is 5-[N-(1-naphthylmethyl)carboxyamide]-2'-deoxyuridine
  misc_feature (6)..(6): n is 2'-O-methyl-cytidine
  misc_feature (9)..(9): n is 2'-O-methyl-guanosine
  misc_feature (10)..(10): n is 5-[N-(1-naphthylmethyl)carboxyamide]-2'-deoxyuridine
  misc_feature (12)..(12): n is 2'-O-methyl-cytidine
  misc_feature (13)..(14): n is 5-[N-(1-naphthylmethyl)carboxyamide]-2'-deoxyuridine
  misc_feature (15)..(15): n is 2'-O-methyl-guanosine
  misc_feature (16)..(16): n is 5-[N-(1-naphthylmethyl)carboxyamide]-2'-deoxyuridine
  misc_feature (17)..(17): n is 2'-O-methyl-adenosine
  misc_feature (18)..(18): n is 2'-O-methyl-guanosine
  misc_feature (21)..(21): n is 5-[N-(1-naphthylmethyl)carboxyamide]-2'-deoxyuridine
  misc_feature (22)..(22): n is 5-[N-(1-naphthylmethyl)carboxyamide]-2'- O-methyl-uridine
  misc_feature (23)..(23): n is 5-[N-(1-naphthylmethyl)carboxyamide]-2'-deoxyuridine
  misc_feature (27)..(27): n is 5-[N-(1-naphthylmethyl)carboxyamide]-2'-deoxyuridine
  misc_feature (28)..(29): n is 2'-O-methyl-guanosine
  misc_feature (30)..(35): n is hexaethylene glycol
  misc_feature (44)..(44): n is 5-[N-(1-naphthylmethyl)carboxyamide]-2'-deoxyuridine
  misc_feature (46)..(46): n is 5-[N-(1-naphthylmethyl)carboxyamide]-2'-deoxyuridine
  misc_feature (48)..(48): n is 5-[N-(1-naphthylmethyl)carboxyamide]-2'-deoxyuridine
  misc_feature (54)..(54): n is 5-[N-(1-naphthylmethyl)carboxyamide]-2'-deoxyuridine
  misc_feature (56)..(56): n is 5-[N-(1-naphthylmethyl)carboxyamide]-2'-deoxyuridine
ccgnnnaanngnnnnnnngannnaaannnnnnnnncgacagcangnangcacancn

SEQ ID NO: 750 - DNA, 55 bp, Artificial Sequence
  Synthetic
  misc_feature (4)..(5): n is 5-[N-(1-naphthylmethyl)carboxyamide]-2'-deoxyuridine
  misc_feature (6)..(6): n is 2'-O-methyl-cytidine
  misc_feature (9)..(9): n is 2'-O-methyl-guanosine
  misc_feature (10)..(10): n is 5-[N-(1-naphthylmethyl)carboxyamide]-2'-deoxyuridine
  misc_feature (12)..(12): n is 2'-O-methyl-cytidine
  misc_feature (13)..(14): n is 5-[N-(1-naphthylmethyl)carboxyamide]-2'-deoxyuridine
  misc_feature (15)..(15): n is 2'-O-methyl-guanosine
  misc_feature (16)..(16): n is 5-[N-(1-naphthylmethyl)carboxyamide]-2'-deoxyuridine
  misc_feature (17)..(17): n is 2'-O-methyl-adenosine
  misc_feature (18)..(18): n is 2'-O-methyl-guanosine
  misc_feature (21)..(21): n is 5-[N-(1-naphthylmethyl)carboxyamide]-2'-deoxyuridine
  misc_feature (22)..(22): n is 5-[N-(1-naphthylmethyl)carboxyamide]-2'- O-methyl-uridine
  misc_feature (23)..(23): n is 5-[N-(1-naphthylmethyl)carboxyamide]-2'-deoxyuridine
  misc_feature (27)..(27): n is 5-[N-(1-naphthylmethyl)carboxyamide]-2'-deoxyuridine
  misc_feature (28)..(29): n is 2'-O-methyl-guanosine
  misc_feature (30)..(34): n is hexaethylene glycol
  misc_feature (43)..(43): n is 5-[N-(1-naphthylmethyl)carboxyamide]-2'-deoxyuridine
  misc_feature (45)..(45): n is 5-[N-(1-naphthylmethyl)carboxyamide]-2'-deoxyuridine
  misc_feature (47)..(47): n is 5-[N-(1-naphthylmethyl)carboxyamide]-2'-deoxyuridine
  misc_feature (53)..(53): n is 5-[N-(1-naphthylmethyl)carboxyamide]-2'-deoxyuridine
  misc_feature (55)..(55): n is 5-[N-(1-naphthylmethyl)carboxyamide]-2'-deoxyuridine
ccgnnnaanngnnnnnnngannnaaannnnnnnncgacagcangnangcacancn

SEQ ID NO: 751 - DNA, 54 bp, Artificial Sequence
  Synthetic
  misc_feature (4)..(5): n is 5-[N-(1-naphthylmethyl)carboxyamide]-2'-deoxyuridine
  misc_feature (6)..(6): n is 2'-O-methyl-cytidine
  misc_feature (9)..(9): n is 2'-O-methyl-guanosine
  misc_feature (10)..(10): n is 5-[N-(1-naphthylmethyl)carboxyamide]-2'-deoxyuridine
  misc_feature (12)..(12): n is 2'-O-methyl-cytidine
  misc_feature (13)..(14): n is 5-[N-(1-naphthylmethyl)carboxyamide]-2'-deoxyuridine
  misc_feature (15)..(15): n is 2'-O-methyl-guanosine
  misc_feature (16)..(16): n is 5-[N-(1-naphthylmethyl)carboxyamide]-2'-deoxyuridine
  misc_feature (17)..(17): n is 2'-O-methyl-adenosine
  misc_feature (18)..(18): n is 2'-O-methyl-guanosine
  misc_feature (21)..(21): n is 5-[N-(1-naphthylmethyl)carboxyamide]-2'-deoxyuridine
  misc_feature (22)..(22): n is 5-[N-(1-naphthylmethyl)carboxyamide]-2'- O-methyl-uridine
  misc_feature (23)..(23): n is 5-[N-(1-naphthylmethyl)carboxyamide]-2'-deoxyuridine
  misc_feature (27)..(27): n is 5-[N-(1-naphthylmethyl)carboxyamide]-2'-deoxyuridine
  misc_feature (28)..(29): n is 2'-O-methyl-guanosine
  misc_feature (30)..(33): n is hexaethylene glycol
  misc_feature (42)..(42): n is 5-[N-(1-naphthylmethyl)carboxyamide]-2'-deoxyuridine
  misc_feature (44)..(44): n is 5-[N-(1-naphthylmethyl)carboxyamide]-2'-deoxyuridine
  misc_feature (46)..(46): n is 5-[N-(1-naphthylmethyl)carboxyamide]-2'-deoxyuridine
  misc_feature (52)..(52): n is 5-[N-(1-naphthylmethyl)carboxyamide]-2'-deoxyuridine
  misc_feature (54)..(54): n is 5-[N-(1-naphthylmethyl)carboxyamide]-2'-deoxyuridine
ccgnnnaanngnnnnnnngannnaaannnnnnncgacagcangnangcacancn

SEQ ID NO: 752 - DNA, 53 bp, Artificial Sequence
  Synthetic
  misc_feature (4)..(5): n is 5-[N-(1-naphthylmethyl)carboxyamide]-2'-deoxyuridine
  misc_feature (6)..(6): n is 2'-O-methyl-cytidine
  misc_feature (9)..(9): n is 2'-O-methyl-guanosine
  misc_feature (10)..(10): n is 5-[N-(1-naphthylmethyl)carboxyamide]-2'-deoxyuridine
  misc_feature (12)..(12): n is 2'-O-methyl-cytidine
  misc_feature (13)..(14): n is 5-[N-(1-naphthylmethyl)carboxyamide]-2'-deoxyuridine
  misc_feature (15)..(15): n is 2'-O-methyl-guanosine
  misc_feature (16)..(16): n is 5-[N-(1-naphthylmethyl)carboxyamide]-2'-deoxyuridine
  misc_feature (17)..(17): n is 2'-O-methyl-adenosine
  misc_feature (18)..(18): n is 2'-O-methyl-guanosine
  misc_feature (21)..(21): n is 5-[N-(1-naphthylmethyl)carboxyamide]-2'-deoxyuridine
  misc_feature (22)..(22): n is 5-[N-(1-naphthylmethyl)carboxyamide]-2'- O-methyl-uridine
  misc_feature (23)..(23): n is 5-[N-(1-naphthylmethyl)carboxyamide]-2'-deoxyuridine
  misc_feature (27)..(27): n is 5-[N-(1-naphthylmethyl)carboxyamide]-2'-deoxyuridine
  misc_feature (28)..(29): n is 2'-O-methyl-guanosine
  misc_feature (30)..(32): n is hexaethylene glycol
  misc_feature (41)..(41): n is 5-[N-(1-naphthylmethyl)carboxyamide]-2'-deoxyuridine
  misc_feature (43)..(43): n is 5-[N-(1-naphthylmethyl)carboxyamide]-2'-deoxyuridine
  misc_feature (45)..(45): n is 5-[N-(1-naphthylmethyl)carboxyamide]-2'-deoxyuridine
  misc_feature (51)..(51): n is 5-[N-(1-naphthylmethyl)carboxyamide]-2'-deoxyuridine
  misc_feature (53)..(53): n is 5-[N-(1-naphthylmethyl)carboxyamide]-2'-deoxyuridine
ccgnnnaanngnnnnnnngannnaaannnnnncgacagcangnangcacancn

SEQ ID NO: 753 - DNA, 52 bp, Artificial Sequence
  Synthetic
  misc_feature (4)..(5): n is 5-[N-(1-naphthylmethyl)carboxyamide]-2'-deoxyuridine
  misc_feature (6)..(6): n is 2'-O-methyl-cytidine
  misc_feature (9)..(9): n is 2'-O-methyl-guanosine
  misc_feature (10)..(10): n is 5-[N-(1-naphthylmethyl)carboxyamide]-2'-deoxyuridine
  misc_feature (12)..(12): n is 2'-O-methyl-cytidine
  misc_feature (13)..(14): n is 5-[N-(1-naphthylmethyl)carboxyamide]-2'-deoxyuridine
  misc_feature (15)..(15): n is 2'-O-methyl-guanosine
  misc_feature (16)..(16): n is 5-[N-(1-naphthylmethyl)carboxyamide]-2'-deoxyuridine
  misc_feature (17)..(17): n is 2'-O-methyl-adenosine
  misc_feature (18)..(18): n is 2'-O-methyl-guanosine
  misc_feature (21)..(21): n is 5-[N-(1-naphthylmethyl)carboxyamide]-2'-deoxyuridine
  misc_feature (22)..(22): n is 5-[N-(1-naphthylmethyl)carboxyamide]-2'- O-methyl-uridine
  misc_feature (23)..(23): n is 5-[N-(1-naphthylmethyl)carboxyamide]-2'-deoxyuridine
  misc_feature (27)..(27): n is 5-[N-(1-naphthylmethyl)carboxyamide]-2'-deoxyuridine
  misc_feature (28)..(29): n is 2'-O-methyl-guanosine
  misc_feature (30)..(31): n is hexaethylene glycol
  misc_feature (40)..(40): n is 5-[N-(1-naphthylmethyl)carboxyamide]-2'-deoxyuridine
  misc_feature (42)..(42): n is 5-[N-(1-naphthylmethyl)carboxyamide]-2'-deoxyuridine
  misc_feature (44)..(44): n is 5-[N-(1-naphthylmethyl)carboxyamide]-2'-deoxyuridine
  misc_feature (50)..(50): n is 5-[N-(1-naphthylmethyl)carboxyamide]-2'-deoxyuridine
  misc_feature (52)..(52): n is 5-[N-(1-naphthylmethyl)carboxyamide]-2'-deoxyuridine
ccgnnnaanngnnnnnnngannnaaannnnncgacagcangnangcacancn

SEQ ID NO: 754 - DNA, 51 bp, Artificial Sequence
  Synthetic
  misc_feature (4)..(5): n is 5-[N-(1-naphthylmethyl)carboxyamide]-2'-deoxyuridine
  misc_feature (6)..(6): n is 2'-O-methyl-cytidine
  misc_feature (9)..(9): n is 2'-O-methyl-guanosine
  misc_feature (10)..(10): n is 5-[N-(1-naphthylmethyl)carboxyamide]-2'-deoxyuridine
  misc_feature (12)..(12): n is 2'-O-methyl-cytidine
  misc_feature (13)..(14): n is 5-[N-(1-naphthylmethyl)carboxyamide]-2'-deoxyuridine
  misc_feature (15)..(15): n is 2'-O-methyl-guanosine
  misc_feature (16)..(16): n is 5-[N-(1-naphthylmethyl)carboxyamide]-2'-deoxyuridine
  misc_feature (17)..(17): n is 2'-O-methyl-adenosine
  misc_feature (18)..(18): n is 2'-O-methyl-guanosine
  misc_feature (21)..(21): n is 5-[N-(1-naphthylmethyl)carboxyamide]-2'-deoxyuridine
  misc_feature (22)..(22): n is 5-[N-(1-naphthylmethyl)carboxyamide]-2'- O-methyl-uridine
  misc_feature (23)..(23): n is 5-[N-(1-naphthylmethyl)carboxyamide]-2'-deoxyuridine
  misc_feature (27)..(27): n is 5-[N-(1-naphthylmethyl)carboxyamide]-2'-deoxyuridine
  misc_feature (28)..(29): n is 2'-O-methyl-guanosine
  misc_feature (30)..(30): n is hexaethylene glycol
  misc_feature (39)..(39): n is 5-[N-(1-naphthylmethyl)carboxyamide]-2'-deoxyuridine
  misc_feature (41)..(41): n is 5-[N-(1-naphthylmethyl)carboxyamide]-2'-deoxyuridine
  misc_feature (43)..(43): n is 5-[N-(1-naphthylmethyl)carboxyamide]-2'-deoxyuridine
  misc_feature (49)..(49): n is 5-[N-(1-naphthylmethyl)carboxyamide]-2'-deoxyuridine
  misc_feature (51)..(51): n is 5-[N-(1-naphthylmethyl)carboxyamide]-2'-deoxyuridine
ccgnnnaanngnnnnnnngannnaaannnncgacagcangnangcacancn

SEQ ID NO: 755 - DNA, 56 bp, Artificial Sequence
  Synthetic
  misc_feature (9)..(9): n is 5-[N-(1-naphthylmethyl)carboxyamide]-2'-deoxyuridine
  misc_feature (11)..(11): n is 5-[N-(1-naphthylmethyl)carboxyamide]-2'-deoxyuridine
  misc_feature (13)..(13): n is 5-[N-(1-naphthylmethyl)carboxyamide]-2'-deoxyuridine
  misc_feature (19)..(19): n is 5-[N-(1-naphthylmethyl)carboxyamide]-2'-deoxyuridine
  misc_feature (21)..(21): n is 5-[N-(1-naphthylmethyl)carboxyamide]-2'-deoxyuridine
  misc_feature (22)..(27): n is hexaethylene glycol
  misc_feature (31)..(32): n is 5-[N-(1-naphthylmethyl)carboxyamide]-2'-deoxyuridine
  misc_feature (33)..(33): n is 2'-O-methyl-cytidine
  misc_feature (36)..(36): n is 2'-O-methyl-guanosine
  misc_feature (37)..(37): n is 5-[N-(1-naphthylmethyl)carboxyamide]-2'-deoxyuridine
  misc_feature (39)..(39): n is 2'-O-methyl-cytidine
  misc_feature (40)..(41): n is 5-[N-(1-naphthylmethyl)carboxyamide]-2'-deoxyuridine
  misc_feature (42)..(42): n is 2'-O-methyl-guanosine
  misc_feature (43)..(43): n is 5-[N-(1-naphthylmethyl)carboxyamide]-2'-deoxyuridine
  misc_feature (44)..(44): n is 2'-O-methyl-adenosine
  misc_feature (45)..(45): n is 2'-O-methyl-guanosine
  misc_feature (48)..(48): n is 5-[N-(1-naphthylmethyl)carboxyamide]-2'-deoxyuridine
  misc_feature (49)..(49): n is 5-[N-(1-naphthylmethyl)carboxyamide]-2'- O-methyl-uridine
  misc_feature (50)..(50): n is 5-[N-(1-naphthylmethyl)carboxyamide]-2'-deoxyuridine
  misc_feature (54)..(54): n is 5-[N-(1-naphthylmethyl)carboxyamide]-2'-deoxyuridine
  misc_feature (55)..(56): n is 2'-O-methyl-guanosine
cgacagcangnangcacancnnnnnnnccgnnnaanngnnnnnnngannnaaannn

SEQ ID NO: 756 - DNA, 55 bp, Artificial Sequence
  Synthetic
  misc_feature (9)..(9): n is 5-[N-(1-naphthylmethyl)carboxyamide]-2'-deoxyuridine
  misc_feature (11)..(11): n is 5-[N-(1-naphthylmethyl)carboxyamide]-2'-deoxyuridine
  misc_feature (13)..(13): n is 5-[N-(1-naphthylmethyl)carboxyamide]-2'-deoxyuridine
  misc_feature (19)..(19): n is 5-[N-(1-naphthylmethyl)carboxyamide]-2'-deoxyuridine
  misc_feature (21)..(21): n is 5-[N-(1-naphthylmethyl)carboxyamide]-2'-deoxyuridine
  misc_feature (22)..(26): n is hexaethylene glycol
  misc_feature (30)..(31): n is 5-[N-(1-naphthylmethyl)carboxyamide]-2'-deoxyuridine
  misc_feature (32)..(32): n is 2'-O-methyl-cytidine
  misc_feature (35)..(35): n is 2'-O-methyl-guanosine
  misc_feature (36)..(36): n is 5-[N-(1-naphthylmethyl)carboxyamide]-2'-deoxyuridine
  misc_feature (38)..(38): n is 2'-O-methyl-cytidine
  misc_feature (39)..(40): n is 5-[N-(1-naphthylmethyl)carboxyamide]-2'-deoxyuridine
  misc_feature (41)..(41): n is 2'-O-methyl-guanosine
  misc_feature (42)..(42): n is 5-[N-(1-naphthylmethyl)carboxyamide]-2'-deoxyuridine
  misc_feature (43)..(43): n is 2'-O-methyl-adenosine
  misc_feature (44)..(44): n is 2'-O-methyl-guanosine
  misc_feature (47)..(47): n is 5-[N-(1-naphthylmethyl)carboxyamide]-2'-deoxyuridine
  misc_feature (48)..(48): n is 5-[N-(1-naphthylmethyl)carboxyamide]-2'- O-methyl-uridine
  misc_feature (49)..(49): n is 5-[N-(1-naphthylmethyl)carboxyamide]-2'-deoxyuridine
  misc_feature (53)..(53): n is 5-[N-(1-naphthylmethyl)carboxyamide]-2'-deoxyuridine
  misc_feature (54)..(55): n is 2'-O-methyl-guanosine
cgacagcangnangcacancnnnnnnccgnnnaanngnnnnnnngannnaaannn

SEQ ID NO: 757 - DNA, 54 bp, Artificial Sequence
  Synthetic
  misc_feature (9)..(9): n is 5-[N-(1-naphthylmethyl)carboxyamide]-2'-deoxyuridine
  misc_feature (11)..(11): n is 5-[N-(1-naphthylmethyl)carboxyamide]-2'-deoxyuridine
  misc_feature (13)..(13): n is 5-[N-(1-naphthylmethyl)carboxyamide]-2'-deoxyuridine
  misc_feature (19)..(19): n is 5-[N-(1-naphthylmethyl)carboxyamide]-2'-deoxyuridine
  misc_feature (21)..(21): n is 5-[N-(1-naphthylmethyl)carboxyamide]-2'-deoxyuridine
  misc_feature (22)..(25): n is hexaethylene glycol
  misc_feature (29)..(30): n is 5-[N-(1-naphthylmethyl)carboxyamide]-2'-deoxyuridine
  misc_feature (31)..(31): n is 2'-O-methyl-cytidine
  misc_feature (34)..(34): n is 2'-O-methyl-guanosine
  misc_feature (35)..(35): n is 5-[N-(1-naphthylmethyl)carboxyamide]-2'-deoxyuridine
  misc_feature (37)..(37): n is 2'-O-methyl-cytidine
  misc_feature (38)..(39): n is 5-[N-(1-naphthylmethyl)carboxyamide]-2'-deoxyuridine
  misc_feature (40)..(40): n is 2'-O-methyl-guanosine
  misc_feature (41)..(41): n is 5-[N-(1-naphthylmethyl)carboxyamide]-2'-deoxyuridine
  misc_feature (42)..(42): n is 2'-O-methyl-adenosine
  misc_feature (43)..(43): n is 2'-O-methyl-guanosine
  misc_feature (46)..(46): n is 5-[N-(1-naphthylmethyl)carboxyamide]-2'-deoxyuridine
  misc_feature (47)..(47): n is 5-[N-(1-naphthylmethyl)carboxyamide]-2'- O-methyl-uridine
  misc_feature (48)..(48): n is 5-[N-(1-naphthylmethyl)carboxyamide]-2'-deoxyuridine
  misc_feature (52)..(52): n is 5-[N-(1-naphthylmethyl)carboxyamide]-2'-deoxyuridine
  misc_feature (53)..(54): n is 2'-O-methyl-guanosine
cgacagcangnangcacancnnnnnccgnnnaanngnnnnnnngannnaaannn

SEQ ID NO: 758 - DNA, 53 bp, Artificial Sequence
  Synthetic
  misc_feature (9)..(9): n is 5-[N-(1-naphthylmethyl)carboxyamide]-2'-deoxyuridine
  misc_feature (11)..(11): n is 5-[N-(1-naphthylmethyl)carboxyamide]-2'-deoxyuridine
  misc_feature (13)..(13): n is 5-[N-(1-naphthylmethyl)carboxyamide]-2'-deoxyuridine
  misc_feature (19)..(19): n is 5-[N-(1-naphthylmethyl)carboxyamide]-2'-deoxyuridine
  misc_feature (21)..(21): n is 5-[N-(1-naphthylmethyl)carboxyamide]-2'-deoxyuridine
  misc_feature (22)..(24): n is hexaethylene glycol
  misc_feature (28)..(29): n is 5-[N-(1-naphthylmethyl)carboxyamide]-2'-deoxyuridine
  misc_feature (30)..(30): n is 2'-O-methyl-cytidine
  misc_feature (33)..(33): n is 2'-O-methyl-guanosine
  misc_feature (34)..(34): n is 5-[N-(1-naphthylmethyl)carboxyamide]-2'-deoxyuridine
  misc_feature (36)..(36): n is 2'-O-methyl-cytidine
  misc_feature (37)..(38): n is 5-[N-(1-naphthylmethyl)carboxyamide]-2'-deoxyuridine
  misc_feature (39)..(39): n is 2'-O-methyl-guanosine
  misc_feature (40)..(40): n is 5-[N-(1-naphthylmethyl)carboxyamide]-2'-deoxyuridine
  misc_feature (41)..(41): n is 2'-O-methyl-adenosine
  misc_feature (42)..(42): n is 2'-O-methyl-guanosine
  misc_feature (45)..(45): n is 5-[N-(1-naphthylmethyl)carboxyamide]-2'-deoxyuridine
  misc_feature (46)..(46): n is 5-[N-(1-naphthylmethyl)carboxyamide]-2'- O-methyl-uridine
  misc_feature (47)..(47): n is 5-[N-(1-naphthylmethyl)carboxyamide]-2'-deoxyuridine
  misc_feature (51)..(51): n is 5-[N-(1-naphthylmethyl)carboxyamide]-2'-deoxyuridine
  misc_feature (52)..(53): n is 2'-O-methyl-guanosine
cgacagcangnangcacancnnnnccgnnnaanngnnnnnnngannnaaannn

SEQ ID NO: 759 - DNA, 52 bp, Artificial Sequence
  Synthetic
  misc_feature (9)..(9): n is 5-[N-(1-naphthylmethyl)carboxyamide]-2'-deoxyuridine
  misc_feature (11)..(11): n is 5-[N-(1-naphthylmethyl)carboxyamide]-2'-deoxyuridine
  misc_feature (13)..(13): n is 5-[N-(1-naphthylmethyl)carboxyamide]-2'-deoxyuridine
  misc_feature (19)..(19): n is 5-[N-(1-naphthylmethyl)carboxyamide]-2'-deoxyuridine
  misc_feature (21)..(21): n is 5-[N-(1-naphthylmethyl)carboxyamide]-2'-deoxyuridine
  misc_feature (22)..(23): n is hexaethylene glycol
  misc_feature (27)..(28): n is 5-[N-(1-naphthylmethyl)carboxyamide]-2'-deoxyuridine
  misc_feature (29)..(29): n is 2'-O-methyl-cytidine
  misc_feature (32)..(32): n is 2'-O-methyl-guanosine
  misc_feature (33)..(33): n is 5-[N-(1-naphthylmethyl)carboxyamide]-2'-deoxyuridine
  misc_feature (35)..(35): n is 2'-O-methyl-cytidine
  misc_feature (36)..(37): n is 5-[N-(1-naphthylmethyl)carboxyamide]-2'-deoxyuridine
  misc_feature (38)..(38): n is 2'-O-methyl-guanosine
  misc_feature (39)..(39): n is 5-[N-(1-naphthylmethyl)carboxyamide]-2'-deoxyuridine
  misc_feature (40)..(40): n is 2'-O-methyl-adenosine
  misc_feature (41)..(41): n is 2'-O-methyl-guanosine
  misc_feature (44)..(44): n is 5-[N-(1-naphthylmethyl)carboxyamide]-2'-deoxyuridine
  misc_feature (45)..(45): n is 5-[N-(1-naphthylmethyl)carboxyamide]-2'- O-methyl-uridine
  misc_feature (46)..(46): n is 5-[N-(1-naphthylmethyl)carboxyamide]-2'-deoxyuridine
  misc_feature (50)..(50): n is 5-[N-(1-naphthylmethyl)carboxyamide]-2'-deoxyuridine
  misc_feature (51)..(52): n is 2'-O-methyl-guanosine
cgacagcangnangcacancnnnccgnnnaanngnnnnnnngannnaaannn

SEQ ID NO: 760 - DNA, 51 bp, Artificial Sequence
  Synthetic
  misc_feature (9)..(9): n is 5-[N-(1-naphthylmethyl)carboxyamide]-2'-deoxyuridine
  misc_feature (11)..(11): n is 5-[N-(1-naphthylmethyl)carboxyamide]-2'-deoxyuridine
  misc_feature (13)..(13): n is 5-[N-(1-naphthylmethyl)carboxyamide]-2'-deoxyuridine
  misc_feature (19)..(19): n is 5-[N-(1-naphthylmethyl)carboxyamide]-2'-deoxyuridine
  misc_feature (21)..(21): n is 5-[N-(1-naphthylmethyl)carboxyamide]-2'-deoxyuridine
  misc_feature (22)..(22): n is hexaethylene glycol
  misc_feature (26)..(27): n is 5-[N-(1-naphthylmethyl)carboxyamide]-2'-deoxyuridine
  misc_feature (28)..(28): n is 2'-O-methyl-cytidine
  misc_feature (31)..(31): n is 2'-O-methyl-guanosine
  misc_feature (32)..(32): n is 5-[N-(1-naphthylmethyl)carboxyamide]-2'-deoxyuridine
  misc_feature (34)..(34): n is 2'-O-methyl-cytidine
  misc_feature (35)..(36): n is 5-[N-(1-naphthylmethyl)carboxyamide]-2'-deoxyuridine
  misc_feature (37)..(37): n is 2'-O-methyl-guanosine
  misc_feature (38)..(38): n is 5-[N-(1-naphthylmethyl)carboxyamide]-2'-deoxyuridine
  misc_feature (39)..(39): n is 2'-O-methyl-adenosine
  misc_feature (40)..(40): n is 2'-O-methyl-guanosine
  misc_feature (43)..(43): n is 5-[N-(1-naphthylmethyl)carboxyamide]-2'-deoxyuridine
  misc_feature (44)..(44): n is 5-[N-(1-naphthylmethyl)carboxyamide]-2'- O-methyl-uridine
  misc_feature (45)..(45): n is 5-[N-(1-naphthylmethyl)carboxyamide]-2'-deoxyuridine
  misc_feature (49)..(49): n is 5-[N-(1-naphthylmethyl)carboxyamide]-2'-deoxyuridine
  misc_feature (50)..(51): n is 2'-O-methyl-guanosine
cgacagcangnangcacancnnccgnnnaanngnnnnnnngannnaaannn

SEQ ID NO: 761 - DNA, 4 bp, Artificial Sequence
  Synthetic
  misc_feature (1)..(1): n is a naturally occurring or modified nucleotide
  misc_feature (2)..(2): n is a modified pyrimidine
nnvs

SEQ ID NO: 762 - DNA, 19 bp, Artificial Sequence
  Synthetic
  misc_feature (1)..(1): n is c or g
  misc_feature (2)..(2): n is c, g or a modified pyrimidine
  misc_feature (3)..(3): n is a modified pyrimidine
  misc_feature (6)..(6): n is a naturally occurring or modified nucleotide
  misc_feature (7)..(7): n is Nm, wherein N is a naturally occurring or modified nucleotide; m is 1 to 20
  misc_feature (11)..(13): n is a modified pyrimidine
  misc_feature (15)..(15): n is a modified pyrimidine
nnnacnngcgnnnanagcg

SEQ ID NO: 763 - DNA, 29 bp, Artificial Sequence
  Synthetic
  misc_feature (1)..(1): 2'-deoxycytidine-3'-phosphorothioate
  misc_feature (4)..(5): 5-[N-(1-naphthylmethyl)carboxyamide]-2'-deoxyuridine
  misc_feature (6)..(6): 2'-O-methyl-cytidine
  misc_feature (9)..(9): 2'-O-methyl-guanosine
  misc_feature (10)..(10): 5-[N-(1-naphthylmethyl)carboxyamide]-2'-deoxyuridine
  misc_feature (12)..(12): 2'-O-methyl-cytidine
  misc_feature (13)..(14): 5-[N-(1-naphthylmethyl)carboxyamide]-2'-deoxyuridine
  misc_feature (15)..(15): 2'-O-methyl-guanosine
  misc_feature (16)..(16): 5-[N-(1-naphthylmethyl)carboxyamide]-2'-deoxyuridine
  misc_feature (17)..(17): 2'-O-methyl-adenosine
  misc_feature (18)..(18): 2'-O-methyl-guanosine
  misc_feature (21)..(21): 5-[N-(1-naphthylmethyl)carboxyamide]-2'-deoxyuridine
  misc_feature (22)..(22): 5-[N-(1-naphthylmethyl)carboxyamide]-2'-O-methyl-uridine
  misc_feature (23)..(23): 5-[N-(1-naphthylmethyl)carboxyamide]-2'-deoxyuridine
  misc_feature (27)..(27): 5-[N-(1-naphthylmethyl)carboxyamide]-2'-deoxyuridine
  misc_feature (28)..(29): 2'-O-methyl-guanosine
ncgnnnaanngnnnnnnngannnaaannn

SEQ ID NO: 764 - DNA, 29 bp, Artificial Sequence
  Synthetic
  misc_feature (2)..(2): 2'-deoxycytidine-3'-phosphorothioate
  misc_feature (4)..(5): 5-[N-(1-naphthylmethyl)carboxyamide]-2'-deoxyuridine
  misc_feature (6)..(6): 2'-O-methyl-cytidine
  misc_feature (9)..(9): 2'-O-methyl-guanosine
  misc_feature (10)..(10): 5-[N-(1-naphthylmethyl)carboxyamide]-2'-deoxyuridine
  misc_feature (12)..(12): 2'-O-methyl-cytidine
  misc_feature (13)..(14): 5-[N-(1-naphthylmethyl)carboxyamide]-2'-deoxyuridine
  misc_feature (15)..(15): 2'-O-methyl-guanosine
  misc_feature (16)..(16): 5-[N-(1-naphthylmethyl)carboxyamide]-2'-deoxyuridine
  misc_feature (17)..(17): 2'-O-methyl-adenosine
  misc_feature (18)..(18): 2'-O-methyl-guanosine
  misc_feature (21)..(21): 5-[N-(1-naphthylmethyl)carboxyamide]-2'-deoxyuridine
  misc_feature (22)..(22): 5-[N-(1-naphthylmethyl)carboxyamide]-2'-O-methyl-uridine
  misc_feature (23)..(23): 5-[N-(1-naphthylmethyl)carboxyamide]-2'-deoxyuridine
  misc_feature (27)..(27): 5-[N-(1-naphthylmethyl)carboxyamide]-2'-deoxyuridine
  misc_feature (28)..(29): 2'-O-methyl-guanosine
cngnnnaanngnnnnnnngannnaaannn

SEQ ID NO: 765 - DNA, 29 bp, Artificial Sequence
  Synthetic
  misc_feature (3)..(3): 2'-deoxyguanosine-3'-phosphorothioate
  misc_feature (4)..(5): 5-[N-(1-naphthylmethyl)carboxyamide]-2'-deoxyuridine
  misc_feature (6)..(6): 2'-O-methyl-cytidine
  misc_feature (9)..(9): 2'-O-methyl-guanosine
  misc_feature (10)..(10): 5-[N-(1-naphthylmethyl)carboxyamide]-2'-deoxyuridine
  misc_feature (12)..(12): 2'-O-methyl-cytidine
  misc_feature (13)..(14): 5-[N-(1-naphthylmethyl)carboxyamide]-2'-deoxyuridine
  misc_feature (15)..(15): 2'-O-methyl-guanosine
  misc_feature (16)..(16): 5-[N-(1-naphthylmethyl)carboxyamide]-2'-deoxyuridine
  misc_feature (17)..(17): 2'-O-methyl-adenosine
  misc_feature (18)..(18): 2'-O-methyl-guanosine
  misc_feature (21)..(21): 5-[N-(1-naphthylmethyl)carboxyamide]-2'-deoxyuridine
  misc_feature (22)..(22): 5-[N-(1-naphthylmethyl)carboxyamide]-2'-O-methyl-uridine
  misc_feature (23)..(23): 5-[N-(1-naphthylmethyl)carboxyamide]-2'-deoxyuridine
  misc_feature (27)..(27): 5-[N-(1-naphthylmethyl)carboxyamide]-2'-deoxyuridine
  misc_feature (28)..(29): 2'-O-methyl-guanosine
ccnnnnaanngnnnnnnngannnaaannn

SEQ ID NO: 766 - DNA, 29 bp, Artificial Sequence
  Synthetic
  misc_feature (4)..(4): 5-[N-(1-naphthylmethyl)carboxyamide]-2'-deoxyuridine-3'-phosphoro thioate
  misc_feature (5)..(5): 5-[N-(1-naphthylmethyl)carboxyamide]-2'-deoxyuridine
  misc_feature (6)..(6): 2'-O-methyl-cytidine
  misc_feature (9)..(9): 2'-O-methyl-guanosine
  misc_feature (10)..(10): 5-[N-(1-naphthylmethyl)carboxyamide]-2'-deoxyuridine
  misc_feature (12)..(12): 2'-O-methyl-cytidine
  misc_feature (13)..(14): 5-[N-(1-naphthylmethyl)carboxyamide]-2'-deoxyuridine
  misc_feature (15)..(15): 2'-O-methyl-guanosine
  misc_feature (16)..(16): 5-[N-(1-naphthylmethyl)carboxyamide]-2'-deoxyuridine
  misc_feature (17)..(17): 2'-O-methyl-adenosine
  misc_feature (18)..(18): 2'-O-methyl-guanosine
  misc_feature (21)..(21): 5-[N-(1-naphthylmethyl)carboxyamide]-2'-deoxyuridine
  misc_feature (22)..(22): 5-[N-(1-naphthylmethyl)carboxyamide]-2'-O-methyl-uridine
  misc_feature (23)..(23): 5-[N-(1-naphthylmethyl)carboxyamide]-2'-deoxyuridine
  misc_feature (27)..(27): 5-[N-(1-naphthylmethyl)carboxyamide]-2'-deoxyuridine
  misc_feature (28)..(29): 2'-O-methyl-guanosine
ccgnnnaanngnnnnnnngannnaaannn

SEQ ID NO: 767 - DNA, 29 bp, Artificial Sequence
  Synthetic
  misc_feature (4)..(4): 5-[N-(1-naphthylmethyl)carboxyamide]-2'-deoxyuridine
  misc_feature (5)..(5): 5-[N-(1-naphthylmethyl)carboxyamide]-2'-deoxyuridine-3'-phosphoro thioate
  misc_feature (6)..(6): 2'-O-methyl-cytidine
  misc_feature (9)..(9): 2'-O-methyl-guanosine
  misc_feature (10)..(10): 5-[N-(1-naphthylmethyl)carboxyamide]-2'-deoxyuridine
  misc_feature (12)..(12): 2'-O-methyl-cytidine
  misc_feature (13)..(14): 5-[N-(1-naphthylmethyl)carboxyamide]-2'-deoxyuridine
  misc_feature (15)..(15): 2'-O-methyl-guanosine
  misc_feature (16)..(16): 5-[N-(1-naphthylmethyl)carboxyamide]-2'-deoxyuridine
  misc_feature (17)..(17): 2'-O-methyl-adenosine
  misc_feature (18)..(18): 2'-O-methyl-guanosine
  misc_feature (21)..(21): 5-[N-(1-naphthylmethyl)carboxyamide]-2'-deoxyuridine
  misc_feature (22)..(22): 5-[N-(1-naphthylmethyl)carboxyamide]-2'-O-methyl-uridine
  misc_feature (23)..(23): 5-[N-(1-naphthylmethyl)carboxyamide]-2'-deoxyuridine
  misc_feature (27)..(27): 5-[N-(1-naphthylmethyl)carboxyamide]-2'-deoxyuridine
  misc_feature (28)..(29): 2'-O-methyl-guanosine
ccgnnnaanngnnnnnnngannnaaannn

SEQ ID NO: 768 - DNA, 29 bp, Artificial Sequence
  Synthetic
  misc_feature (4)..(5): 5-[N-(1-naphthylmethyl)carboxyamide]-2'-deoxyuridine
  misc_feature (6)..(6): 2'-O-methyl-cytidine
  misc_feature (7)..(7): 2'-deoxyadenosine-3'-phosphorothioate
  misc_feature (9)..(9): 2'-O-methyl-guanosine
  misc_feature (10)..(10): 5-[N-(1-naphthylmethyl)carboxyamide]-2'-deoxyuridine
  misc_feature (12)..(12): 2'-O-methyl-cytidine
  misc_feature (13)..(14): 5-[N-(1-naphthylmethyl)carboxyamide]-2'-deoxyuridine
  misc_feature (15)..(15): 2'-O-methyl-guanosine
  misc_feature (16)..(16): 5-[N-(1-naphthylmethyl)carboxyamide]-2'-deoxyuridine
  misc_feature (17)..(17): 2'-O-methyl-adenosine
  misc_feature (18)..(18): 2'-O-methyl-guanosine
  misc_feature (21)..(21): 5-[N-(1-naphthylmethyl)carboxyamide]-2'-deoxyuridine
  misc_feature (22)..(22): 5-[N-(1-naphthylmethyl)carboxyamide]-2'-O-methyl-uridine
  misc_feature (23)..(23): 5-[N-(1-naphthylmethyl)carboxyamide]-2'-deoxyuridine
  misc_feature (27)..(27): 5-[N-(1-naphthylmethyl)carboxyamide]-2'-deoxyuridine
  misc_feature (28)..(29): 2'-O-methyl-guanosine
ccgnnnnanngnnnnnnngannnaaannn

SEQ ID NO: 769 - DNA, 29 bp, Artificial Sequence
  Synthetic
  misc_feature (4)..(5): 5-[N-(1-naphthylmethyl)carboxyamide]-2'-deoxyuridine
  misc_feature (6)..(6): 2'-O-methyl-cytidine
  misc_feature (8)..(8): 2'-deoxyadenosine-3'-phosphorothioate
  misc_feature (9)..(9): 2'-O-methyl-guanosine
  misc_feature (10)..(10): 5-[N-(1-naphthylmethyl)carboxyamide]-2'-deoxyuridine
  misc_feature (12)..(12): 2'-O-methyl-cytidine
  misc_feature (13)..(14): 5-[N-(1-naphthylmethyl)carboxyamide]-2'-deoxyuridine
  misc_feature (15)..(15): 2'-O-methyl-guanosine
  misc_feature (16)..(16): 5-[N-(1-naphthylmethyl)carboxyamide]-2'-deoxyuridine
  misc_feature (17)..(17): 2'-O-methyl-adenosine
  misc_feature (18)..(18): 2'-O-methyl-guanosine
  misc_feature (21)..(21): 5-[N-(1-naphthylmethyl)carboxyamide]-2'-deoxyuridine
  misc_feature (22)..(22): 5-[N-(1-naphthylmethyl)carboxyamide]-2'-O-methyl-uridine
  misc_feature (23)..(23): 5-[N-(1-naphthylmethyl)carboxyamide]-2'-deoxyuridine
  misc_feature (27)..(27): 5-[N-(1-naphthylmethyl)carboxyamide]-2'-deoxyuridine
  misc_feature (28)..(29): 2'-O-methyl-guanosine
ccgnnnannngnnnnnnngannnaaannn

SEQ ID NO: 770 - DNA, 29 bp, Artificial Sequence
  Synthetic
  misc_feature (4)..(5): 5-[N-(1-naphthylmethyl)carboxyamide]-2'-deoxyuridine
  misc_feature (6)..(6): 2'-O-methyl-cytidine
  misc_feature (8)..(8): 2'-deoxyadenosine-3'-phosphorothioate
  misc_feature (9)..(9): 2'-O-methyl-guanosine
  misc_feature (10)..(10): 5-[N-(1-naphthylmethyl)carboxyamide]-2'-deoxyuridine-3'-phosphoro thioate
  misc_feature (12)..(12): 2'-O-methyl-cytidine
  misc_feature (13)..(14): 5-[N-(1-naphthylmethyl)carboxyamide]-2'-deoxyuridine
  misc_feature (15)..(15): 2'-O-methyl-guanosine
  misc_feature (16)..(16): 5-[N-(1-naphthylmethyl)carboxyamide]-2'-deoxyuridine
  misc_feature (17)..(17): 2'-O-methyl-adenosine
  misc_feature (18)..(18): 2'-O-methyl-guanosine
  misc_feature (21)..(21): 5-[N-(1-naphthylmethyl)carboxyamide]-2'-deoxyuridine
  misc_feature (22)..(22): 5-[N-(1-naphthylmethyl)carboxyamide]-2'-O-methyl-uridine
  misc_feature (23)..(23): 5-[N-(1-naphthylmethyl)carboxyamide]-2'-deoxyuridine
  misc_feature (27)..(27): 5-[N-(1-naphthylmethyl)carboxyamide]-2'-deoxyuridine
  misc_feature (28)..(29): 2'-O-methyl-guanosine
ccgnnnaanngnnnnnnngannnaaannn

SEQ ID NO: 771 - DNA, 29 bp, Artificial Sequence
  Synthetic
  misc_feature (4)..(5): 5-[N-(1-naphthylmethyl)carboxyamide]-2'-deoxyuridine
  misc_feature (6)..(6): 2'-O-methyl-cytidine
  misc_feature (9)..(9): 2'-O-methyl-guanosine
  misc_feature (10)..(10): 5-[N-(1-naphthylmethyl)carboxyamide]-2'-deoxyuridine
  misc_feature (11)..(11): 2'-deoxyguanosine-3'-phosphorothioate
  misc_feature (12)..(12): 2'-O-methyl-cytidine
  misc_feature (13)..(14): 5-[N-(1-naphthylmethyl)carboxyamide]-2'-deoxyuridine
  misc_feature (15)..(15): 2'-O-methyl-guanosine
  misc_feature (16)..(16): 5-[N-(1-naphthylmethyl)carboxyamide]-2'-deoxyuridine
  misc_feature (17)..(17): 2'-O-methyl-adenosine
  misc_feature (18)..(18): 2'-O-methyl-guanosine
  misc_feature (21)..(21): 5-[N-(1-naphthylmethyl)carboxyamide]-2'-deoxyuridine
  misc_feature (22)..(22): 5-[N-(1-naphthylmethyl)carboxyamide]-2'-O-methyl-uridine
  misc_feature (23)..(23): 5-[N-(1-naphthylmethyl)carboxyamide]-2'-deoxyuridine
  misc_feature (27)..(27): 5-[N-(1-naphthylmethyl)carboxyamide]-2'-deoxyuridine
  misc_feature (28)..(29): 2'-O-methyl-guanosine
ccgnnnaannnnnnnnnngannnaaannn

SEQ ID NO: 772 - DNA, 29 bp, Artificial Sequence
  Synthetic
  misc_feature (4)..(5): 5-[N-(1-naphthylmethyl)carboxyamide]-2'-deoxyuridine
  misc_feature (6)..(6): 2'-O-methyl-cytidine
  misc_feature (9)..(9): 2'-O-methyl-guanosine
  misc_feature (10)..(10): 5-[N-(1-naphthylmethyl)carboxyamide]-2'-deoxyuridine
  misc_feature (12)..(12): 2'-O-methyl-cytidine
  misc_feature (13)..(13): 5-[N-(1-naphthylmethyl)carboxyamide]-2'-deoxyuridine-3'-phosphoro thioate
  misc_feature (14)..(14): 5-[N-(1-naphthylmethyl)carboxyamide]-2'-deoxyuridine
  misc_feature (15)..(15): 2'-O-methyl-guanosine
  misc_feature (16)..(16): 5-[N-(1-naphthylmethyl)carboxyamide]-2'-deoxyuridine
  misc_feature (17)..(17): 2'-O-methyl-adenosine
  misc_feature (18)..(18): 2'-O-methyl-guanosine
  misc_feature (21)..(21): 5-[N-(1-naphthylmethyl)carboxyamide]-2'-deoxyuridine
  misc_feature (22)..(22): 5-[N-(1-naphthylmethyl)carboxyamide]-2'-O-methyl-uridine
  misc_feature (23)..(23): 5-[N-(1-naphthylmethyl)carboxyamide]-2'-deoxyuridine
  misc_feature (27)..(27): 5-[N-(1-naphthylmethyl)carboxyamide]-2'-deoxyuridine
  misc_feature (28)..(29): 2'-O-methyl-guanosine
ccgnnnaanngnnnnnnngannnaaannn

SEQ ID NO: 773 - DNA, 29 bp, Artificial Sequence
  Synthetic
  misc_feature (4)..(5): 5-[N-(1-naphthylmethyl)carboxyamide]-2'-deoxyuridine
  misc_feature (6)..(6): 2'-O-methyl-cytidine
  misc_feature (9)..(9): 2'-O-methyl-guanosine
  misc_feature (10)..(10): 5-[N-(1-naphthylmethyl)carboxyamide]-2'-deoxyuridine
  misc_feature (12)..(12): 2'-O-methyl-cytidine
  misc_feature (13)..(13): 5-[N-(1-naphthylmethyl)carboxyamide]-2'-deoxyuridine
  misc_feature (14)..(14): 5-[N-(1-naphthylmethyl)carboxyamide]-2'-deoxyuridine-3'-phosphoro thioate
  misc_feature (15)..(15): 2'-O-methyl-guanosine
  misc_feature (16)..(16): 5-[N-(1-naphthylmethyl)carboxyamide]-2'-deoxyuridine
  misc_feature (17)..(17): 2'-O-methyl-adenosine
  misc_feature (18)..(18): 2'-O-methyl-guanosine
  misc_feature (21)..(21): 5-[N-(1-naphthylmethyl)carboxyamide]-2'-deoxyuridine
  misc_feature (22)..(22): 5-[N-(1-naphthylmethyl)carboxyamide]-2'-O-methyl-uridine
  misc_feature (23)..(23): 5-[N-(1-naphthylmethyl)carboxyamide]-2'-deoxyuridine
  misc_feature (27)..(27): 5-[N-(1-naphthylmethyl)carboxyamide]-2'-deoxyuridine
  misc_feature (28)..(29): 2'-O-methyl-guanosine
ccgnnnaanngnnnnnnngannnaaannn

SEQ ID NO: 774 - DNA, 29 bp, Artificial Sequence
  Synthetic
  misc_feature (4)..(5): 5-[N-(1-naphthylmethyl)carboxyamide]-2'-deoxyuridine
  misc_feature (6)..(6): 2'-O-methyl-cytidine
  misc_feature (9)..(9): 2'-O-methyl-guanosine
  misc_feature (10)..(10): 5-[N-(1-naphthylmethyl)carboxyamide]-2'-deoxyuridine
  misc_feature (12)..(12): 2'-O-methyl-cytidine
  misc_feature (13)..(14): 5-[N-(1-naphthylmethyl)carboxyamide]-2'-deoxyuridine
  misc_feature (15)..(15): 2'-O-methyl-guanosine
  misc_feature (16)..(16): 5-[N-(1-naphthylmethyl)carboxyamide]-2'-deoxyuridine-3'-phosphoro thioate
  misc_feature (17)..(17): 2'-O-methyl-adenosine
  misc_feature (18)..(18): 2'-O-methyl-guanosine
  misc_feature (21)..(21): 5-[N-(1-naphthylmethyl)carboxyamide]-2'-deoxyuridine
  misc_feature (22)..(22): 5-[N-(1-naphthylmethyl)carboxyamide]-2'-O-methyl-uridine
  misc_feature (23)..(23): 5-[N-(1-naphthylmethyl)carboxyamide]-2'-deoxyuridine
  misc_feature (27)..(27): 5-[N-(1-naphthylmethyl)carboxyamide]-2'-deoxyuridine
  misc_feature (28)..(29): 2'-O-methyl-guanosine
ccgnnnaanngnnnnnnngannnaaannn

SEQ ID NO: 775 - DNA, 29 bp, Artificial Sequence
  Synthetic
  misc_feature (4)..(5): 5-[N-(1-naphthylmethyl)carboxyamide]-2'-deoxyuridine
  misc_feature (6)..(6): 2'-O-methyl-cytidine
  misc_feature (9)..(9): 2'-O-methyl-guanosine
  misc_feature (10)..(10): 5-[N-(1-naphthylmethyl)carboxyamide]-2'-deoxyuridine
  misc_feature (12)..(12): 2'-O-methyl-cytidine
  misc_feature (13)..(14): 5-[N-(1-naphthylmethyl)carboxyamide]-2'-deoxyuridine
  misc_feature (15)..(15): 2'-O-methyl-guanosine
  misc_feature (16)..(16): 5-[N-(1-naphthylmethyl)carboxyamide]-2'-deoxyuridine
  misc_feature (17)..(17): 2'-O-methyl-adenosine
  misc_feature (18)..(18): 2'-O-methyl-guanosine
  misc_feature (19)..(19): 2'-deoxyguanosine-3'-phosphorothioate
  misc_feature (21)..(21): 5-[N-(1-naphthylmethyl)carboxyamide]-2'-deoxyuridine
  misc_feature (22)..(22): 5-[N-(1-naphthylmethyl)carboxyamide]-2'-O-methyl-uridine
  misc_feature (23)..(23): 5-[N-(1-naphthylmethyl)carboxyamide]-2'-deoxyuridine
  misc_feature (27)..(27): 5-[N-(1-naphthylmethyl)carboxyamide]-2'-deoxyuridine
  misc_feature (28)..(29): 2'-O-methyl-guanosine
ccgnnnaanngnnnnnnnnannnaaannn

SEQ ID NO: 776 - DNA, 29 bp, Artificial Sequence
  Synthetic
  misc_feature (4)..(5): 5-[N-(1-naphthylmethyl)carboxyamide]-2'-deoxyuridine
  misc_feature (6)..(6): 2'-O-methyl-cytidine
  misc_feature (9)..(9): 2'-O-methyl-guanosine
  misc_feature (10)..(10): 5-[N-(1-naphthylmethyl)carboxyamide]-2'-deoxyuridine
  misc_feature (12)..(12): 2'-O-methyl-cytidine
  misc_feature (13)..(14): 5-[N-(1-naphthylmethyl)carboxyamide]-2'-deoxyuridine
  misc_feature (15)..(15): 2'-O-methyl-guanosine
  misc_feature (16)..(16): 5-[N-(1-naphthylmethyl)carboxyamide]-2'-deoxyuridine
  misc_feature (17)..(17): 2'-O-methyl-adenosine
  misc_feature (18)..(18): 2'-O-methyl-guanosine
  misc_feature (20)..(20): 2'-deoxyadenosine-3'-phosphorothioate
  misc_feature (21)..(21): 5-[N-(1-naphthylmethyl)carboxyamide]-2'-deoxyuridine
  misc_feature (22)..(22): 5-[N-(1-naphthylmethyl)carboxyamide]-2'-O-methyl-uridine
  misc_feature (23)..(23): 5-[N-(1-naphthylmethyl)carboxyamide]-2'-deoxyuridine
  misc_feature (27)..(27): 5-[N-(1-naphthylmethyl)carboxyamide]-2'-deoxyuridine
  misc_feature (28)..(29): 2'-O-methyl-guanosine
ccgnnnaanngnnnnnnngnnnnaaannn

SEQ ID NO: 777 - DNA, 29 bp, Artificial Sequence
  Synthetic
  misc_feature (4)..(5): 5-[N-(1-naphthylmethyl)carboxyamide]-2'-deoxyuridine
  misc_feature (6)..(6): 2'-O-methyl-cytidine
  misc_feature (9)..(9): 2'-O-methyl-guanosine
  misc_feature (10)..(10): 5-[N-(1-naphthylmethyl)carboxyamide]-2'-deoxyuridine
  misc_feature (12)..(12): 2'-O-methyl-cytidine
  misc_feature (13)..(14): 5-[N-(1-naphthylmethyl)carboxyamide]-2'-deoxyuridine
  misc_feature (15)..(15): 2'-O-methyl-guanosine
  misc_feature (16)..(16): 5-[N-(1-naphthylmethyl)carboxyamide]-2'-deoxyuridine
  misc_feature (17)..(17): 2'-O-methyl-adenosine
  misc_feature (18)..(18): 2'-O-methyl-guanosine
  misc_feature (21)..(21): 5-[N-(1-naphthylmethyl)carboxyamide]-2'-deoxyuridine-3'-phosphoro thioate
  misc_feature (22)..(22): 5-[N-(1-naphthylmethyl)carboxyamide]-2'-O-methyl-uridine
  misc_feature (23)..(23): 5-[N-(1-naphthylmethyl)carboxyamide]-2'-deoxyuridine
  misc_feature (27)..(27): 5-[N-(1-naphthylmethyl)carboxyamide]-2'-deoxyuridine
  misc_feature (28)..(29): 2'-O-methyl-guanosine
ccgnnnaanngnnnnnnngannnaaannn

SEQ ID NO: 778 - DNA, 29 bp, Artificial Sequence
  Synthetic
  misc_feature (4)..(5): 5-[N-(1-naphthylmethyl)carboxyamide]-2'-deoxyuridine
  misc_feature (6)..(6): 2'-O-methyl-cytidine
  misc_feature (9)..(9): 2'-O-methyl-guanosine
  misc_feature (10)..(10): 5-[N-(1-naphthylmethyl)carboxyamide]-2'-deoxyuridine
  misc_feature (12)..(12): 2'-O-methyl-cytidine
  misc_feature (13)..(14): 5-[N-(1-naphthylmethyl)carboxyamide]-2'-deoxyuridine
  misc_feature (15)..(15): 2'-O-methyl-guanosine
  misc_feature (16)..(16): 5-[N-(1-naphthylmethyl)carboxyamide]-2'-deoxyuridine
  misc_feature (17)..(17): 2'-O-methyl-adenosine
  misc_feature (18)..(18): 2'-O-methyl-guanosine
  misc_feature (21)..(21): 5-[N-(1-naphthylmethyl)carboxyamide]-2'-deoxyuridine
  misc_feature (22)..(22): 5-[N-(1-naphthylmethyl)carboxyamide]-2'-O-methyl-uridine
  misc_feature (23)..(23): 5-[N-(1-naphthylmethyl)carboxyamide]-2'-deoxyuridine-3'-phosphoro thioate
  misc_feature (27)..(27): 5-[N-(1-naphthylmethyl)carboxyamide]-2'-deoxyuridine
  misc_feature (28)..(29): 2'-O-methyl-guanosine
ccgnnnaanngnnnnnnngannnaaannn

SEQ ID NO: 779 - DNA, 29 bp, Artificial Sequence
  Synthetic
  misc_feature (4)..(5): 5-[N-(1-naphthylmethyl)carboxyamide]-2'-deoxyuridine
  misc_feature (6)..(6): 2'-O-methyl-cytidine
  misc_feature (9)..(9): 2'-O-methyl-guanosine
  misc_feature (10)..(10): 5-[N-(1-naphthylmethyl)carboxyamide]-2'-deoxyuridine
  misc_feature (12)..(12): 2'-O-methyl-cytidine
  misc_feature (13)..(14): 5-[N-(1-naphthylmethyl)carboxyamide]-2'-deoxyuridine
  misc_feature (15)..(15): 2'-O-methyl-guanosine
  misc_feature (16)..(16): 5-[N-(1-naphthylmethyl)carboxyamide]-2'-deoxyuridine
  misc_feature (17)..(17): 2'-O-methyl-adenosine
  misc_feature (18)..(18): 2'-O-methyl-guanosine
  misc_feature (21)..(21): 5-[N-(1-naphthylmethyl)carboxyamide]-2'-deoxyuridine
  misc_feature (22)..(22): 5-[N-(1-naphthylmethyl)carboxyamide]-2'-O-methyl-uridine
  misc_feature (23)..(23): 5-[N-(1-naphthylmethyl)carboxyamide]-2'-deoxyuridine
  misc_feature (24)..(24): 2'-deoxyadenosine-3'-phosphorothioate
  misc_feature (27)..(27): 5-[N-(1-naphthylmethyl)carboxyamide]-2'-deoxyuridine
  misc_feature (28)..(29): 2'-O-methyl-guanosine
ccgnnnaanngnnnnnnngannnnaannn

SEQ ID NO: 780 - DNA, 29 bp, Artificial Sequence
  Synthetic
  misc_feature (4)..(5): 5-[N-(1-naphthylmethyl)carboxyamide]-2'-deoxyuridine
  misc_feature (6)..(6): 2'-O-methyl-cytidine
  misc_feature (9)..(9): 2'-O-methyl-guanosine
  misc_feature (10)..(10): 5-[N-(1-naphthylmethyl)carboxyamide]-2'-deoxyuridine
  misc_feature (12)..(12): 2'-O-methyl-cytidine
  misc_feature (13)..(14): 5-[N-(1-naphthylmethyl)carboxyamide]-2'-deoxyuridine
  misc_feature (15)..(15): 2'-O-methyl-guanosine
  misc_feature (16)..(16): 5-[N-(1-naphthylmethyl)carboxyamide]-2'-deoxyuridine
  misc_feature (17)..(17): 2'-O-methyl-adenosine
  misc_feature (18)..(18): 2'-O-methyl-guanosine
  misc_feature (21)..(21): 5-[N-(1-naphthylmethyl)carboxyamide]-2'-deoxyuridine
  misc_feature (22)..(22): 5-[N-(1-naphthylmethyl)carboxyamide]-2'-O-methyl-uridine
  misc_feature (23)..(23): 5-[N-(1-naphthylmethyl)carboxyamide]-2'-deoxyuridine
  misc_feature (25)..(25): 2'-deoxyadenosine-3'-phosphorothioate
  misc_feature (27)..(27): 5-[N-(1-naphthylmethyl)carboxyamide]-2'-deoxyuridine
  misc_feature (28)..(29): 2'-O-methyl-guanosine
ccgnnnaanngnnnnnnngannnanannn

SEQ ID NO: 781 - DNA, 29 bp, Artificial Sequence
  Synthetic
  misc_feature (4)..(5): 5-[N-(1-naphthylmethyl)carboxyamide]-2'-deoxyuridine
  misc_feature (6)..(6): 2'-O-methyl-cytidine
  misc_feature (9)..(9): 2'-O-methyl-guanosine
  misc_feature (10)..(10): 5-[N-(1-naphthylmethyl)carboxyamide]-2'-deoxyuridine
  misc_feature (12)..(12): 2'-O-methyl-cytidine
  misc_feature (13)..(14): 5-[N-(1-naphthylmethyl)carboxyamide]-2'-deoxyuridine
  misc_feature (15)..(15): 2'-O-methyl-guanosine
  misc_feature (16)..(16): 5-[N-(1-naphthylmethyl)carboxyamide]-2'-deoxyuridine
  misc_feature (17)..(17): 2'-O-methyl-adenosine
  misc_feature (18)..(18): 2'-O-methyl-guanosine
  misc_feature (21)..(21): 5-[N-(1-naphthylmethyl)carboxyamide]-2'-deoxyuridine
  misc_feature (22)..(22): 5-[N-(1-naphthylmethyl)carboxyamide]-2'-O-methyl-uridine
  misc_feature (23)..(23): 5-[N-(1-naphthylmethyl)carboxyamide]-2'-deoxyuridine
  misc_feature (26)..(26): 2'-deoxyadenosine-3'-phosphorothioate
  misc_feature (27)..(27): 5-[N-(1-naphthylmethyl)carboxyamide]-2'-deoxyuridine
  misc_feature (28)..(29): 2'-O-methyl-guanosine
ccgnnnaanngnnnnnnngannnaannnn

SEQ ID NO: 782 - DNA, 29 bp, Artificial Sequence
  Synthetic
  misc_feature (4)..(5): 5-[N-(1-naphthylmethyl)carboxyamide]-2'-deoxyuridine
  misc_feature (6)..(6): 2'-O-methyl-cytidine
  misc_feature (9)..(9): 2'-O-methyl-guanosine
  misc_feature (10)..(10): 5-[N-(1-naphthylmethyl)carboxyamide]-2'-deoxyuridine
  misc_feature (12)..(12): 2'-O-methyl-cytidine
  misc_feature (13)..(14): 5-[N-(1-naphthylmethyl)carboxyamide]-2'-deoxyuridine
  misc_feature (15)..(15): 2'-O-methyl-guanosine
  misc_feature (16)..(16): 5-[N-(1-naphthylmethyl)carboxyamide]-2'-deoxyuridine
  misc_feature (17)..(17): 2'-O-methyl-adenosine
  misc_feature (18)..(18): 2'-O-methyl-guanosine
  misc_feature (21)..(21): 5-[N-(1-naphthylmethyl)carboxyamide]-2'-deoxyuridine
  misc_feature (22)..(22): 5-[N-(1-naphthylmethyl)carboxyamide]-2'-O-methyl-uridine
  misc_feature (23)..(23): 5-[N-(1-naphthylmethyl)carboxyamide]-2'-deoxyuridine
  misc_feature (27)..(27): 5-[N-(1-naphthylmethyl)carboxyamide]-2'-deoxyuridine-3'-phosphoro thioate
  misc_feature (28)..(29): 2'-O-methyl-guanosine
ccgnnnaanngnnnnnnngannnaaannn

SEQ ID NO: 783 - DNA, 29 bp, Artificial Sequence
  Synthetic
  misc_feature (4)..(5): 5-[N-(1-naphthylmethyl)carboxyamide]-2'-deoxyuridine
  misc_feature (6)..(6): 2'-O-methyl-cytidine-3'-phosphorothioate
  misc_feature (9)..(9): 2'-O-methyl-guanosine
  misc_feature (10)..(10): 5-[N-(1-naphthylmethyl)carboxyamide]-2'-deoxyuridine
  misc_feature (12)..(12): 2'-O-methyl-cytidine
  misc_feature (13)..(14): 5-[N-(1-naphthylmethyl)carboxyamide]-2'-deoxyuridine
  misc_feature (15)..(15): 2'-O-methyl-guanosine
  misc_feature (16)..(16): 5-[N-(1-naphthylmethyl)carboxyamide]-2'-deoxyuridine
  misc_feature (17)..(17): 22'-O-methyl-adenosine
  misc_feature (18)..(18): 2'-O-methyl-guanosine
  misc_feature (21)..(21): 5-[N-(1-naphthylmethyl)carboxyamide]-2'-deoxyuridine
  misc_feature (22)..(22): 5-[N-(1-naphthylmethyl)carboxyamide]-2'-O-methyl-uridine
  misc_feature (23)..(23): 5-[N-(1-naphthylmethyl)carboxyamide]-2'-deoxyuridine
  misc_feature (27)..(27): 5-[N-(1-naphthylmethyl)carboxyamide]-2'-deoxyuridine
  misc_feature (28)..(29): 2'-O-methyl-guanosine
ccgnnnaanngnnnnnnngannnaaannn

SEQ ID NO: 784 - DNA, 29 bp, Artificial Sequence
  Synthetic
  misc_feature (4)..(5): 5-[N-(1-naphthylmethyl)carboxyamide]-2'-deoxyuridine
  misc_feature (6)..(6): 2'-O-methyl-cytidine
  misc_feature (9)..(9): 2'-O-methyl-guanosine-3'-phosphorothioate
  misc_feature (10)..(10): 5-[N-(1-naphthylmethyl)carboxyamide]-2'-deoxyuridine
  misc_feature (12)..(12): 2'-O-methyl-cytidine
  misc_feature (13)..(14): 5-[N-(1-naphthylmethyl)carboxyamide]-2'-deoxyuridine
  misc_feature (15)..(15): 2'-O-methyl-guanosine
  misc_feature (16)..(16): 5-[N-(1-naphthylmethyl)carboxyamide]-2'-deoxyuridine
  misc_feature (17)..(17): 2'-O-methyl-adenosine
  misc_feature (18)..(18): 2'-O-methyl-guanosine
  misc_feature (21)..(21): 5-[N-(1-naphthylmethyl)carboxyamide]-2'-deoxyuridine
  misc_feature (22)..(22): 5-[N-(1-naphthylmethyl)carboxyamide]-2'-O-methyl-uridine
  misc_feature (23)..(23): 5-[N-(1-naphthylmethyl)carboxyamide]-2'-deoxyuridine
  misc_feature (27)..(27): 5-[N-(1-naphthylmethyl)carboxyamide]-2'-deoxyuridine
  misc_feature (28)..(29): 2'-O-methyl-guanosine
ccgnnnaanngnnnnnnngannnaaannn

SEQ ID NO: 785 - DNA, 29 bp, Artificial Sequence
  Synthetic
  misc_feature (4)..(5): 5-[N-(1-naphthylmethyl)carboxyamide]-2'-deoxyuridine
  misc_feature (6)..(6): 2'-O-methyl-cytidine
  misc_feature (9)..(9): 2'-O-methyl-guanosine
  misc_feature (10)..(10): 5-[N-(1-naphthylmethyl)carboxyamide]-2'-deoxyuridine
  misc_feature (12)..(12): 2'-O-methyl-cytidine-3'-phosphorothioate
  misc_feature (13)..(14): 5-[N-(1-naphthylmethyl)carboxyamide]-2'-deoxyuridine
  misc_feature (15)..(15): 2'-O-methyl-guanosine
  misc_feature (16)..(16): 5-[N-(1-naphthylmethyl)carboxyamide]-2'-deoxyuridine
  misc_feature (17)..(17): 2'-O-methyl-adenosine
  misc_feature (18)..(18): 2'-O-methyl-guanosine
  misc_feature (21)..(21): 5-[N-(1-naphthylmethyl)carboxyamide]-2'-deoxyuridine
  misc_feature (22)..(22): 5-[N-(1-naphthylmethyl)carboxyamide]-2'-O-methyl-uridine
  misc_feature (23)..(23): 5-[N-(1-naphthylmethyl)carboxyamide]-2'-deoxyuridine
  misc_feature (27)..(27): 5-[N-(1-naphthylmethyl)carboxyamide]-2'-deoxyuridine
  misc_feature (28)..(29): 2'-O-methyl-guanosine
ccgnnnaanngnnnnnnngannnaaannn

SEQ ID NO: 786 - DNA, 29 bp, Artificial Sequence
  Synthetic
  misc_feature (4)..(5): 5-[N-(1-naphthylmethyl)carboxyamide]-2'-deoxyuridine
  misc_feature (6)..(6): 2'-O-methyl-cytidine
  misc_feature (9)..(9): 2'-O-methyl-guanosine
  misc_feature (10)..(10): 5-[N-(1-naphthylmethyl)carboxyamide]-2'-deoxyuridine
  misc_feature (12)..(12): 2'-O-methyl-cytidine
  misc_feature (13)..(14): 5-[N-(1-naphthylmethyl)carboxyamide]-2'-deoxyuridine
  misc_feature (15)..(15): 2'-O-methyl-guanosine-3'-phosphorothioate
  misc_feature (16)..(16): 5-[N-(1-naphthylmethyl)carboxyamide]-2'-deoxyuridine
  misc_feature (17)..(17): 2'-O-methyl-adenosine
  misc_feature (18)..(18): 2'-O-methyl-guanosine
  misc_feature (21)..(21): 5-[N-(1-naphthylmethyl)carboxyamide]-2'-deoxyuridine
  misc_feature (22)..(22): 5-[N-(1-naphthylmethyl)carboxyamide]-2'-O-methyl-uridine
  misc_feature (23)..(23): 5-[N-(1-naphthylmethyl)carboxyamide]-2'-deoxyuridine
  misc_feature (27)..(27): 5-[N-(1-naphthylmethyl)carboxyamide]-2'-deoxyuridine
  misc_feature (28)..(29): 2'-O-methyl-guanosine
ccgnnnaanngnnnnnnngannnaaannn

SEQ ID NO: 787 - DNA, 29 bp, Artificial Sequence
  Synthetic
  misc_feature (4)..(5): 5-[N-(1-naphthylmethyl)carboxyamide]-2'-deoxyuridine
  misc_feature (6)..(6): 2'-O-methyl-cytidine
  misc_feature (9)..(9): 2'-O-methyl-guanosine
  misc_feature (10)..(10): 5-[N-(1-naphthylmethyl)carboxyamide]-2'-deoxyuridine
  misc_feature (12)..(12): 2'-O-methyl-cytidine
  misc_feature (13)..(14): 5-[N-(1-naphthylmethyl)carboxyamide]-2'-deoxyuridine
  misc_feature (15)..(15): 2'-O-methyl-guanosine
  misc_feature (16)..(16): 5-[N-(1-naphthylmethyl)carboxyamide]-2'-deoxyuridine
  misc_feature (17)..(17): 2'-O-methyl-adenosine-3'-phosphorothioate
  misc_feature (18)..(18): 2'-O-methyl-guanosine
  misc_feature (21)..(21): 5-[N-(1-naphthylmethyl)carboxyamide]-2'-deoxyuridine
  misc_feature (22)..(22): 5-[N-(1-naphthylmethyl)carboxyamide]-2'-O-methyl-uridine
  misc_feature (23)..(23): 5-[N-(1-naphthylmethyl)carboxyamide]-2'-deoxyuridine
  misc_feature (27)..(27): 5-[N-(1-naphthylmethyl)carboxyamide]-2'-deoxyuridine
  misc_feature (28)..(29): 2'-O-methyl-guanosine
ccgnnnaanngnnnnnnngannnaaannn

SEQ ID NO: 788 - DNA, 29 bp, Artificial Sequence
  Synthetic
  misc_feature (4)..(5): 5-[N-(1-naphthylmethyl)carboxyamide]-2'-deoxyuridine
  misc_feature (6)..(6): 2'-O-methyl-cytidine
  misc_feature (9)..(9): 2'-O-methyl-guanosine
  misc_feature (10)..(10): 5-[N-(1-naphthylmethyl)carboxyamide]-2'-deoxyuridine
  misc_feature (12)..(12): 2'-O-methyl-cytidine
  misc_feature (13)..(14): 5-[N-(1-naphthylmethyl)carboxyamide]-2'-deoxyuridine
  misc_feature (15)..(15): 2'-O-methyl-guanosine
  misc_feature (16)..(16): 5-[N-(1-naphthylmethyl)carboxyamide]-2'-deoxyuridine
  misc_feature (17)..(17): 2'-O-methyl-adenosine
  misc_feature (18)..(18): 2'-O-methyl-guanosine-3'-phosphorothioate
  misc_feature (21)..(21): 5-[N-(1-naphthylmethyl)carboxyamide]-2'-deoxyuridine
  misc_feature (22)..(22): 5-[N-(1-naphthylmethyl)carboxyamide]-2'-O-methyl-uridine
  misc_feature (23)..(23): 5-[N-(1-naphthylmethyl)carboxyamide]-2'-deoxyuridine
  misc_feature (27)..(27): 5-[N-(1-naphthylmethyl)carboxyamide]-2'-deoxyuridine
  misc_feature (28)..(29): 2'-O-methyl-guanosine
ccgnnnaanngnnnnnnngannnaaannn

SEQ ID NO: 789 - DNA, 29 bp, Artificial Sequence
  Synthetic
  misc_feature (4)..(5): 5-[N-(1-naphthylmethyl)carboxyamide]-2'-deoxyuridine
  misc_feature (6)..(6): 2'-O-methyl-cytidine
  misc_feature (9)..(9): 2'-O-methyl-guanosine
  misc_feature (10)..(10): 5-[N-(1-naphthylmethyl)carboxyamide]-2'-deoxyuridine
  misc_feature (12)..(12): 2'-O-methyl-cytidine
  misc_feature (13)..(14): 5-[N-(1-naphthylmethyl)carboxyamide]-2'-deoxyuridine
  misc_feature (15)..(15): 2'-O-methyl-guanosine
  misc_feature (16)..(16): 5-[N-(1-naphthylmethyl)carboxyamide]-2'-deoxyuridine
  misc_feature (17)..(17): 2'-O-methyl-adenosine
  misc_feature (18)..(18): 2'-O-methyl-guanosine
  misc_feature (21)..(21): 5-[N-(1-naphthylmethyl)carboxyamide]-2'-deoxyuridine
  misc_feature (22)..(22): 5-[N-(1-naphthylmethyl)carboxyamide]-2'-O-methyl-uridine
  misc_feature (23)..(23): 5-[N-(1-naphthylmethyl)carboxyamide]-2'-deoxyuridine
  misc_feature (27)..(27): 5-[N-(1-naphthylmethyl)carboxyamide]-2'-deoxyuridine
  misc_feature (28)..(28): 2'-O-methyl-guanosine-3'-phosphorothioate
  misc_feature (29)..(29): 2'-O-methyl-guanosine
ccgnnnaanngnnnnnnngannnaaannn

SEQ ID NO: 790 - DNA, 29 bp, Artificial Sequence
  Synthetic
  misc_feature (4)..(5): 5-[N-(1-naphthylmethyl)carboxyamide]-2'-deoxyuridine
  misc_feature (6)..(6): 2'-O-methyl-cytidine
  misc_feature (9)..(9): 2'-O-methyl-guanosine
  misc_feature (10)..(10): 5-[N-(1-naphthylmethyl)carboxyamide]-2'-deoxyuridine
  misc_feature (12)..(12): 2'-O-methyl-cytidine
  misc_feature (13)..(14): 5-[N-(1-naphthylmethyl)carboxyamide]-2'-deoxyuridine
  misc_feature (15)..(15): 2'-O-methyl-guanosine
  misc_feature (16)..(16): 5-[N-(1-naphthylmethyl)carboxyamide]-2'-deoxyuridine
  misc_feature (17)..(17): 2'-O-methyl-adenosine
  misc_feature (18)..(18): 2'-O-methyl-guanosine
  misc_feature (21)..(21): 5-[N-(1-naphthylmethyl)carboxyamide]-2'-deoxyuridine
  misc_feature (22)..(22): 5-[N-(1-naphthylmethyl)carboxyamide]-2'-O-methyl-uridine
  misc_feature (23)..(23): 5-[N-(1-naphthylmethyl)carboxyamide]-2'-deoxyuridine
  misc_feature (27)..(27): 5-[N-(1-naphthylmethyl)carboxyamide]-2'-deoxyuridine
  misc_feature (28)..(28): 2'-O-methyl-guanosine
  misc_feature (29)..(29): 2'-O-methyl-guanosine-3'-phosphorothioate
ccgnnnaanngnnnnnnngannnaaannn

SEQ ID NO: 791 - DNA, 29 bp, Artificial Sequence
  Synthetic
  misc_feature (1)..(1): 2'-O-methyl-cytidine
  misc_feature (4)..(5): 5-[N-(1-naphthylmethyl)carboxyamide]-2'-deoxyuridine
  misc_feature (6)..(6): 2'-O-methyl-cytidine
  misc_feature (9)..(9): 2'-O-methyl-guanosine
  misc_feature (10)..(10): 5-[N-(1-naphthylmethyl)carboxyamide]-2'-deoxyuridine
  misc_feature (12)..(12): 2'-O-methyl-cytidine
  misc_feature (13)..(14): 5-[N-(1-naphthylmethyl)carboxyamide]-2'-deoxyuridine
  misc_feature (15)..(15): 2'-O-methyl-guanosine
  misc_feature (16)..(16): 5-[N-(1-naphthylmethyl)carboxyamide]-2'-deoxyuridine
  misc_feature (17)..(17): 2'-O-methyl-adenosine
  misc_feature (18)..(18): 2'-O-methyl-guanosine
  misc_feature (21)..(21): 5-[N-(1-naphthylmethyl)carboxyamide]-2'-deoxyuridine
  misc_feature (22)..(22): 5-[N-(1-naphthylmethyl)carboxyamide]-2'-O-methyl-uridine
  misc_feature (23)..(23): 5-[N-(1-naphthylmethyl)carboxyamide]-2'-deoxyuridine
  misc_feature (25)..(25): 2'-deoxyadenosine-3'-phosphorothioate
  misc_feature (27)..(27): 5-[N-(1-naphthylmethyl)carboxyamide]-2'-deoxyuridine
  misc_feature (28)..(29): 2'-O-methyl-guanosine
ncgnnnaanngnnnnnnngannnanannn

SEQ ID NO: 792 - DNA, 29 bp, Artificial Sequence
  Synthetic
  misc_feature (1)..(1): 2'-O-methyl-cytidine
  misc_feature (4)..(5): 5-[N-(1-naphthylmethyl)carboxyamide]-2'-deoxyuridine
  misc_feature (6)..(6): 2'-O-methyl-cytidine
  misc_feature (9)..(9): 2'-O-methyl-guanosine
  misc_feature (10)..(10): 5-[N-(1-naphthylmethyl)carboxyamide]-2'-deoxyuridine
  misc_feature (12)..(12): 2'-O-methyl-cytidine
  misc_feature (13)..(14): 5-[N-(1-naphthylmethyl)carboxyamide]-2'-deoxyuridine
  misc_feature (15)..(15): 2'-O-methyl-guanosine
  misc_feature (16)..(16): 5-[N-(1-naphthylmethyl)carboxyamide]-2'-deoxyuridine
  misc_feature (17)..(17): 2'-O-methyl-adenosine
  misc_feature (18)..(18): 2'-O-methyl-guanosine
  misc_feature (21)..(21): 5-[N-(1-naphthylmethyl)carboxyamide]-2'-deoxyuridine
  misc_feature (22)..(22): 5-[N-(1-naphthylmethyl)carboxyamide]-2'-O-methyl-uridine
  misc_feature (23)..(23): 5-[N-(1-naphthylmethyl)carboxyamide]-2'-deoxyuridine
  misc_feature (26)..(26): 2'-deoxyadenosine-3'-phosphorothioate
  misc_feature (27)..(27): 5-[N-(1-naphthylmethyl)carboxyamide]-2'-deoxyuridine
  misc_feature (28)..(29): 2'-O-methyl-guanosine
ncgnnnaanngnnnnnnngannnaannnn

SEQ ID NO: 793 - DNA, 29 bp, Artificial Sequence
  Synthetic
  misc_feature (1)..(1): 2'-O-methyl-cytidine
  misc_feature (4)..(5): 5-[N-(1-naphthylmethyl)carboxyamide]-2'-deoxyuridine
  misc_feature (6)..(6): 2'-O-methyl-cytidine
  misc_feature (9)..(9): 2'-O-methyl-guanosine
  misc_feature (10)..(10): 5-[N-(1-naphthylmethyl)carboxyamide]-2'-deoxyuridine
  misc_feature (12)..(12): 2'-O-methyl-cytidine
  misc_feature (13)..(14): 5-[N-(1-naphthylmethyl)carboxyamide]-2'-deoxyuridine
  misc_feature (15)..(15): 2'-O-methyl-guanosine
  misc_feature (16)..(16): 5-[N-(1-naphthylmethyl)carboxyamide]-2'-deoxyuridine
  misc_feature (17)..(17): 2'-O-methyl-adenosine
  misc_feature (18)..(18): 2'-O-methyl-guanosine
  misc_feature (21)..(21): 5-[N-(1-naphthylmethyl)carboxyamide]-2'-deoxyuridine
  misc_feature (22)..(22): 5-[N-(1-naphthylmethyl)carboxyamide]-2'-O-methyl-uridine
  misc_feature (23)..(23): 5-[N-(1-naphthylmethyl)carboxyamide]-2'-deoxyuridine
  misc_feature (25)..(26): 2'-deoxyadenosine-3'-phosphorothioate
  misc_feature (27)..(27): 5-[N-(1-naphthylmethyl)carboxyamide]-2'-deoxyuridine
  misc_feature (28)..(29): 2'-O-methyl-guanosine
ncgnnnaanngnnnnnnngannnannnnn

SEQ ID NO: 794 - DNA, 29 bp, Artificial Sequence
  Synthetic
  misc_feature (4)..(5): 5-[N-(1-naphthylmethyl)carboxyamide]-2'-deoxyuridine
  misc_feature (6)..(6): 2'-O-methyl-cytidine
  misc_feature (9)..(9): 2'-O-methyl-guanosine
  misc_feature (10)..(10): 5-[N-(1-naphthylmethyl)carboxyamide]-2'-deoxyuridine
  misc_feature (12)..(12): 2'-O-methyl-cytidine
  misc_feature (13)..(14): 5-[N-(1-naphthylmethyl)carboxyamide]-2'-deoxyuridine
  misc_feature (15)..(15): 2'-O-methyl-guanosine
  misc_feature (16)..(16): 5-[N-(1-naphthylmethyl)carboxyamide]-2'-deoxyuridine
  misc_feature (17)..(17): 2'-O-methyl-adenosine
  misc_feature (18)..(18): 2'-O-methyl-guanosine
  misc_feature (21)..(21): 5-[N-(1-naphthylmethyl)carboxyamide]-2'-deoxyuridine
  misc_feature (22)..(22): 5-[N-(1-naphthylmethyl)carboxyamide]-2'-O-methyl-uridine
  misc_feature (23)..(23): 5-[N-(1-naphthylmethyl)carboxyamide]-2'-deoxyuridine
  misc_feature (25)..(26): 2'-deoxyadenosine-3'-phosphorothioate
  misc_feature (27)..(27): 5-[N-(1-naphthylmethyl)carboxyamide]-2'-deoxyuridine
  misc_feature (28)..(29): 2'-O-methyl-guanosine
ccgnnnaanngnnnnnnngannnannnnn

SEQ ID NO: 795 - DNA, 29 bp, Artificial Sequence
  Synthetic
  misc_feature (1)..(1): 2'-O-methyl-cytidine
  misc_feature (4)..(5): 5-[N-(1-naphthylmethyl)carboxyamide]-2'-deoxyuridine
  misc_feature (6)..(6): 2'-O-methyl-cytidine
  misc_feature (9)..(9): 2'-O-methyl-guanosine
  misc_feature (10)..(10): 5-[N-(1-naphthylmethyl)carboxyamide]-2'-deoxyuridine
  misc_feature (12)..(12): 2'-O-methyl-cytidine
  misc_feature (13)..(14): 5-[N-(1-naphthylmethyl)carboxyamide]-2'-deoxyuridine
  misc_feature (15)..(15): 2'-O-methyl-guanosine
  misc_feature (16)..(16): 5-[N-(1-naphthylmethyl)carboxyamide]-2'-deoxyuridine
  misc_feature (17)..(17): 2'-O-methyl-adenosine
  misc_feature (18)..(18): 2'-O-methyl-guanosine
  misc_feature (21)..(21): 5-[N-(1-naphthylmethyl)carboxyamide]-2'-deoxyuridine
  misc_feature (22)..(22): 5-[N-(1-naphthylmethyl)carboxyamide]-2'-O-methyl-uridine
  misc_feature (23)..(23): 5-[N-(1-naphthylmethyl)carboxyamide]-2'-deoxyuridine
  misc_feature (24)..(24): 2'-deoxyadenosine-3'-phosphorothioate
  misc_feature (27)..(27): 5-[N-(1-naphthylmethyl)carboxyamide]-2'-deoxyuridine
  misc_feature (28)..(29): 2'-O-methyl-guanosine
ncgnnnaanngnnnnnnngannnnaannn

SEQ ID NO: 796 - DNA, 29 bp, Artificial Sequence
  Synthetic
  misc_feature (1)..(1): 2'-O-methyl-cytidine
  misc_feature (4)..(5): 5-[N-(1-naphthylmethyl)carboxyamide]-2'-deoxyuridine
  misc_feature (6)..(6): 2'-O-methyl-cytidine
  misc_feature (9)..(9): 2'-O-methyl-guanosine
  misc_feature (10)..(10): 5-[N-(1-naphthylmethyl)carboxyamide]-2'-deoxyuridine
  misc_feature (12)..(12): 2'-O-methyl-cytidine
  misc_feature (13)..(14): 5-[N-(1-naphthylmethyl)carboxyamide]-2'-deoxyuridine
  misc_feature (15)..(15): 2'-O-methyl-guanosine
  misc_feature (16)..(16): 5-[N-(1-naphthylmethyl)carboxyamide]-2'-deoxyuridine
  misc_feature (17)..(17): 2'-O-methyl-adenosine
  misc_feature (18)..(18): 2'-O-methyl-guanosine
  misc_feature (21)..(21): 5-[N-(1-naphthylmethyl)carboxyamide]-2'-deoxyuridine
  misc_feature (22)..(22): 5-[N-(1-naphthylmethyl)carboxyamide]-2'-O-methyl-uridine
  misc_feature (23)..(23): 5-[N-(1-naphthylmethyl)carboxyamide]-2'-deoxyuridine
  misc_feature (24)..(25): 2'-deoxyadenosine-3'-phosphorothioate
  misc_feature (27)..(27): 5-[N-(1-naphthylmethyl)carboxyamide]-2'-deoxyuridine
  misc_feature (28)..(29): 2'-O-methyl-guanosine
ncgnnnaanngnnnnnnngannnnnannn

SEQ ID NO: 797 - DNA, 29 bp, Artificial Sequence
  Synthetic
  misc_feature (1)..(1): 2'-O-methyl-cytidine
  misc_feature (4)..(5): 5-[N-(1-naphthylmethyl)carboxyamide]-2'-deoxyuridine
  misc_feature (6)..(6): 2'-O-methyl-cytidine
  misc_feature (9)..(9): 2'-O-methyl-guanosine
  misc_feature (10)..(10): 5-[N-(1-naphthylmethyl)carboxyamide]-2'-deoxyuridine
  misc_feature (12)..(12): 2'-O-methyl-cytidine
  misc_feature (13)..(14): 5-[N-(1-naphthylmethyl)carboxyamide]-2'-deoxyuridine
  misc_feature (15)..(15): 2'-O-methyl-guanosine
  misc_feature (16)..(16): 5-[N-(1-naphthylmethyl)carboxyamide]-2'-deoxyuridine
  misc_feature (17)..(17): 2'-O-methyl-adenosine
  misc_feature (18)..(18): 2'-O-methyl-guanosine
  misc_feature (21)..(21): 5-[N-(1-naphthylmethyl)carboxyamide]-2'-deoxyuridine
  misc_feature (22)..(22): 5-[N-(1-naphthylmethyl)carboxyamide]-2'-O-methyl-uridine
  misc_feature (23)..(23): 5-[N-(1-naphthylmethyl)carboxyamide]-2'-deoxyuridine
  misc_feature (24)..(26): 2'-deoxyadenosine-3'-phosphorothioate
  misc_feature (27)..(27): 5-[N-(1-naphthylmethyl)carboxyamide]-2'-deoxyuridine
  misc_feature (28)..(29): 2'-O-methyl-guanosine
ncgnnnaanngnnnnnnngannnnnnnnn

SEQ ID NO: 798 - DNA, 29 bp, Artificial Sequence
  Synthetic
  misc_feature (4)..(5): 5-[N-(1-naphthylmethyl)carboxyamide]-2'-deoxyuridine
  misc_feature (6)..(6): 2'-O-methyl-cytidine
  misc_feature (9)..(9): 2'-O-methyl-guanosine
  misc_feature (10)..(10): 5-[N-(1-naphthylmethyl)carboxyamide]-2'-deoxyuridine
  misc_feature (12)..(12): 2'-O-methyl-cytidine
  misc_feature (13)..(14): 5-[N-(1-naphthylmethyl)carboxyamide]-2'-deoxyuridine
  misc_feature (15)..(15): 2'-O-methyl-guanosine
  misc_feature (16)..(16): 5-[N-(1-naphthylmethyl)carboxyamide]-2'-deoxyuridine
  misc_feature (17)..(17): 2'-O-methyl-adenosine
  misc_feature (18)..(18): 2'-O-methyl-guanosine
  misc_feature (21)..(21): 5-[N-(1-naphthylmethyl)carboxyamide]-2'-deoxyuridine
  misc_feature (22)..(22): 5-[N-(1-naphthylmethyl)carboxyamide]-2'-O-methyl-uridine
  misc_feature (23)..(23): 5-[N-(1-naphthylmethyl)carboxyamide]-2'-deoxyuridine
  misc_feature (24)..(26): 2'-deoxyadenosine-3'-phosphorothioate
  misc_feature (27)..(27): 5-[N-(1-naphthylmethyl)carboxyamide]-2'-deoxyuridine
  misc_feature (28)..(29): 2'-O-methyl-guanosine
ccgnnnaanngnnnnnnngannnnnnnnn

SEQ ID NO: 799 - DNA, 29 bp, Artificial Sequence
  Synthetic
  misc_feature (4)..(5): 5-[N-(1-naphthylmethyl)carboxyamide]-2'-deoxyuridine
  misc_feature (6)..(6): 2'-O-methyl-cytidine
  misc_feature (9)..(9): 2'-O-methyl-guanosine
  misc_feature (10)..(10): 5-[N-(1-naphthylmethyl)carboxyamide]-2'-deoxyuridine
  misc_feature (12)..(12): 2'-O-methyl-cytidine
  misc_feature (13)..(14): 5-[N-(1-naphthylmethyl)carboxyamide]-2'-deoxyuridine
  misc_feature (15)..(15): 2'-O-methyl-guanosine
  misc_feature (16)..(16): 5-[N-(1-naphthylmethyl)carboxyamide]-2'-deoxyuridine
  misc_feature (17)..(17): 2'-O-methyl-adenosine
  misc_feature (18)..(18): 2'-O-methyl-guanosine
  misc_feature (21)..(21): 5-[N-(1-naphthylmethyl)carboxyamide]-2'-deoxyuridine
  misc_feature (22)..(22): 5-[N-(1-naphthylmethyl)carboxyamide]-2'-O-methyl-uridine
  misc_feature (23)..(23): 5-[N-(1-naphthylmethyl)carboxyamide]-2'-deoxyuridine
  misc_feature (24)..(25): 2'-deoxyadenosine-3'-phosphorothioate
  misc_feature (27)..(27): 5-[N-(1-naphthylmethyl)carboxyamide]-2'-deoxyuridine
  misc_feature (28)..(29): 2'-O-methyl-guanosine
ccgnnnaanngnnnnnnngannnnnannn

SEQ ID NO: 800 - DNA, 21 bp, Artificial Sequence
  Synthetic
  misc_feature (1)..(1): 2'-O-methyl-cytidine
  misc_feature (2)..(2): 2'-deoxyguanosine-3'-phosphorothioate
  misc_feature (4)..(4): 2'-O-methyl-cytidine
  misc_feature (6)..(6): 2'-O-methyl-guanosine
  misc_feature (7)..(7): 2'-O-methyl-cytidine
  misc_feature (9)..(9): 5-[N-(1-naphthylmethyl)carboxyamide]-2'-deoxyuridine
  misc_feature (11)..(11): 5-[N-(1-naphthylmethyl)carboxyamide]-2'-deoxyuridine
  misc_feature (13)..(13): 5-[N-(1-naphthylmethyl)carboxyamide]-2'-deoxyuridine
  misc_feature (14)..(14): 2'-O-methyl-guanosine
  misc_feature (15)..(15): 2'-O-methyl-cytidine
  misc_feature (16)..(16): 2'-O-methyl-adenosine
  misc_feature (17)..(17): 2'-O-methyl-cytidine
  misc_feature (18)..(18): 2'-O-methyl-adenosine
  misc_feature (19)..(19): 5-[N-(1-naphthylmethyl)carboxyamide]-2'-deoxyuridine
  misc_feature (20)..(20): 2'-O-methyl-cytidine
  misc_feature (21)..(21): 5-[N-(1-naphthylmethyl)carboxyamide]-2'-O-methyl-uridine
nnanannangnannnnnnnnn

SEQ ID NO: 801 - DNA, 21 bp, Artificial Sequence
  Synthetic
  misc_feature (1)..(1): 2'-O-methyl-cytidine
  misc_feature (3)..(3): 2'-deoxyadenosine-3'-phosphorothioate
  misc_feature (4)..(4): 2'-O-methyl-cytidine
  misc_feature (6)..(6): 2'-O-methyl-guanosine
  misc_feature (7)..(7): 2'-O-methyl-cytidine
  misc_feature (9)..(9): 5-[N-(1-naphthylmethyl)carboxyamide]-2'-deoxyuridine
  misc_feature (11)..(11): 5-[N-(1-naphthylmethyl)carboxyamide]-2'-deoxyuridine
  misc_feature (13)..(13): 5-[N-(1-naphthylmethyl)carboxyamide]-2'-deoxyuridine
  misc_feature (14)..(14): 2'-O-methyl-guanosine
  misc_feature (15)..(15): 2'-O-methyl-cytidine
  misc_feature (16)..(16): 2'-O-methyl-adenosine
  misc_feature (17)..(17): 2'-O-methyl-cytidine
  misc_feature (18)..(18): 2'-O-methyl-adenosine
  misc_feature (19)..(19): 5-[N-(1-naphthylmethyl)carboxyamide]-2'-deoxyuridine
  misc_feature (20)..(20): 2'-O-methyl-cytidine
  misc_feature (21)..(21): 5-[N-(1-naphthylmethyl)carboxyamide]-2'-O-methyl-uridine
ngnnannangnannnnnnnnn

SEQ ID NO: 802 - DNA, 21 bp, Artificial Sequence
  Synthetic
  misc_feature (1)..(1): 2'-O-methyl-cytidine
  misc_feature (4)..(4): 2'-O-methyl-cytidine
  misc_feature (5)..(5): 2'-deoxyadenosine-3'-phosphorothioate
  misc_feature (6)..(6): 2'-O-methyl-guanosine
  misc_feature (7)..(7): 2'-O-methyl-cytidine
  misc_feature (9)..(9): 5-[N-(1-naphthylmethyl)carboxyamide]-2'-deoxyuridine
  misc_feature (11)..(11): 5-[N-(1-naphthylmethyl)carboxyamide]-2'-deoxyuridine
  misc_feature (13)..(13): 5-[N-(1-naphthylmethyl)carboxyamide]-2'-deoxyuridine
  misc_feature (14)..(14): 2'-O-methyl-guanosine
  misc_feature (15)..(15): 2'-O-methyl-cytidine
  misc_feature (16)..(16): 2'-O-methyl-adenosine
  misc_feature (17)..(17): 2'-O-methyl-cytidine
  misc_feature (18)..(18): 2'-O-methyl-adenosine
  misc_feature (19)..(19): 5-[N-(1-naphthylmethyl)carboxyamide]-2'-deoxyuridine
  misc_feature (20)..(20): 2'-O-methyl-cytidine
  misc_feature (21)..(21): 5-[N-(1-naphthylmethyl)carboxyamide]-2'-O-methyl-uridine
ngannnnangnannnnnnnnn

SEQ ID NO: 803 - DNA, 21 bp, Artificial Sequence
  Synthetic
  misc_feature (1)..(1): 2'-O-methyl-cytidine
  misc_feature (4)..(4): 2'-O-methyl-cytidine
  misc_feature (6)..(6): 2'-O-methyl-guanosine
  misc_feature (7)..(7): 2'-O-methyl-cytidine
  misc_feature (8)..(8): 2'-deoxyadenosine-3'-phosphorothioate
  misc_feature (9)..(9): 5-[N-(1-naphthylmethyl)carboxyamide]-2'-deoxyuridine
  misc_feature (11)..(11): 5-[N-(1-naphthylmethyl)carboxyamide]-2'-deoxyuridine
  misc_feature (13)..(13): 5-[N-(1-naphthylmethyl)carboxyamide]-2'-deoxyuridine
  misc_feature (14)..(14): 2'-O-methyl-guanosine
  misc_feature (15)..(15): 2'-O-methyl-cytidine
  misc_feature (16)..(16): 2'-O-methyl-adenosine
  misc_feature (17)..(17): 2'-O-methyl-cytidine
  misc_feature (18)..(18): 2'-O-methyl-adenosine
  misc_feature (19)..(19): 5-[N-(1-naphthylmethyl)carboxyamide]-2'-deoxyuridine
  misc_feature (20)..(20): 2'-O-methyl-cytidine
  misc_feature (21)..(21): 5-[N-(1-naphthylmethyl)carboxyamide]-2'-O-methyl-uridine
nganannnngnannnnnnnnn

SEQ ID NO: 804 - DNA, 21 bp, Artificial Sequence
  Synthetic
  misc_feature (1)..(1): 2'-O-methyl-cytidine
  misc_feature (4)..(4): 2'-O-methyl-cytidine
  misc_feature (6)..(6): 2'-O-methyl-guanosine
  misc_feature (7)..(7): 2'-O-methyl-cytidine
  misc_feature (9)..(9): 5-[N-(1-naphthylmethyl)carboxyamide]-2'-deoxyuridine-3'-phosphoro thioate
  misc_feature (11)..(11): 5-[N-(1-naphthylmethyl)carboxyamide]-2'-deoxyuridine
  misc_feature (13)..(13): 5-[N-(1-naphthylmethyl)carboxyamide]-2'-deoxyuridine
  misc_feature (14)..(14): 2'-O-methyl-guanosine
  misc_feature (15)..(15): 2'-O-methyl-cytidine
  misc_feature (16)..(16): 2'-O-methyl-adenosine
  misc_feature (17)..(17): 2'-O-methyl-cytidine
  misc_feature (18)..(18): 2'-O-methyl-adenosine
  misc_feature (19)..(19): 5-[N-(1-naphthylmethyl)carboxyamide]-2'-deoxyuridine
  misc_feature (20)..(20): 2'-O-methyl-cytidine
  misc_feature (21)..(21): 5-[N-(1-naphthylmethyl)carboxyamide]-2'-O-methyl-uridine
nganannangnannnnnnnnn

SEQ ID NO: 805 - DNA, 21 bp, Artificial Sequence
  Synthetic
  misc_feature (1)..(1): 2'-O-methyl-cytidine
  misc_feature (4)..(4): 2'-O-methyl-cytidine
  misc_feature (6)..(6): 2'-O-methyl-guanosine
  misc_feature (7)..(7): 2'-O-methyl-cytidine
  misc_feature (9)..(9): 5-[N-(1-naphthylmethyl)carboxyamide]-2'-deoxyuridine
  misc_feature (10)..(10): 2'-deoxyguanosine-3'-phosphorothioate
  misc_feature (11)..(11): 5-[N-(1-naphthylmethyl)carboxyamide]-2'-deoxyuridine
  misc_feature (13)..(13): 5-[N-(1-naphthylmethyl)carboxyamide]-2'-deoxyuridine
  misc_feature (14)..(14): 2'-O-methyl-guanosine
  misc_feature (15)..(15): 2'-O-methyl-cytidine
  misc_feature (16)..(16): 2'-O-methyl-adenosine
  misc_feature (17)..(17): 2'-O-methyl-cytidine
  misc_feature (18)..(18): 2'-O-methyl-adenosine
  misc_feature (19)..(19): 5-[N-(1-naphthylmethyl)carboxyamide]-2'-deoxyuridine
  misc_feature (20)..(20): 2'-O-methyl-cytidine
  misc_feature (21)..(21): 5-[N-(1-naphthylmethyl)carboxyamide]-2'-O-methyl-uridine
nganannannnannnnnnnnn

SEQ ID NO: 806 - DNA, 21 bp, Artificial Sequence
  Synthetic
  misc_feature (1)..(1): 2'-O-methyl-cytidine
  misc_feature (4)..(4): 2'-O-methyl-cytidine
  misc_feature (6)..(6): 2'-O-methyl-guanosine
  misc_feature (7)..(7): 2'-O-methyl-cytidine
  misc_feature (9)..(9): 5-[N-(1-naphthylmethyl)carboxyamide]-2'-deoxyuridine
  misc_feature (11)..(11): 5-[N-(1-naphthylmethyl)carboxyamide]-2'-deoxyuridine-3'-phosphoro thioate
  misc_feature (13)..(13): 5-[N-(1-naphthylmethyl)carboxyamide]-2'-deoxyuridine
  misc_feature (14)..(14): 2'-O-methyl-guanosine
  misc_feature (15)..(15): 2'-O-methyl-cytidine
  misc_feature (16)..(16): 2'-O-methyl-adenosine
  misc_feature (17)..(17): 2'-O-methyl-cytidine
  misc_feature (18)..(18): 2'-O-methyl-adenosine
  misc_feature (19)..(19): 5-[N-(1-naphthylmethyl)carboxyamide]-2'-deoxyuridine
  misc_feature (20)..(20): 2'-O-methyl-cytidine
  misc_feature (21)..(21): 5-[N-(1-naphthylmethyl)carboxyamide]-2'-O-methyl-uridine
nganannangnannnnnnnnn

SEQ ID NO: 807 - DNA, 21 bp, Artificial Sequence
  Synthetic
  misc_feature (1)..(1): 2'-O-methyl-cytidine
  misc_feature (4)..(4): 2'-O-methyl-cytidine
  misc_feature (6)..(6): 2'-O-methyl-guanosine
  misc_feature (7)..(7): 2'-O-methyl-cytidine
  misc_feature (9)..(9): 5-[N-(1-naphthylmethyl)carboxyamide]-2'-deoxyuridine
  misc_feature (11)..(11): 5-[N-(1-naphthylmethyl)carboxyamide]-2'-deoxyuridine
  misc_feature (12)..(12): 2'-deoxyadenosine-3'-phosphorothioate
  misc_feature (13)..(13): 5-[N-(1-naphthylmethyl)carboxyamide]-2'-deoxyuridine
  misc_feature (14)..(14): 2'-O-methyl-guanosine
  misc_feature (15)..(15): 2'-O-methyl-cytidine
  misc_feature (16)..(16): 2'-O-methyl-adenosine
  misc_feature (17)..(17): 2'-O-methyl-cytidine
  misc_feature (18)..(18): 2'-O-methyl-adenosine
  misc_feature (19)..(19): 5-[N-(1-naphthylmethyl)carboxyamide]-2'-deoxyuridine
  misc_feature (20)..(20): 2'-O-methyl-cytidine
  misc_feature (21)..(21): 5-[N-(1-naphthylmethyl)carboxyamide]-2'-O-methyl-uridine
nganannangnnnnnnnnnnn

SEQ ID NO: 808 - DNA, 21 bp, Artificial Sequence
  Synthetic
  misc_feature (1)..(1): 2'-O-methyl-cytidine
  misc_feature (4)..(4): 2'-O-methyl-cytidine
  misc_feature (6)..(6): 2'-O-methyl-guanosine
  misc_feature (7)..(7): 2'-O-methyl-cytidine
  misc_feature (9)..(9): 5-[N-(1-naphthylmethyl)carboxyamide]-2'-deoxyuridine
  misc_feature (11)..(11): 5-[N-(1-naphthylmethyl)carboxyamide]-2'-deoxyuridine
  misc_feature (13)..(13): 5-[N-(1-naphthylmethyl)carboxyamide]-2'-deoxyuridine-3'-phosphoro thioate
  misc_feature (14)..(14): 2'-O-methyl-guanosine
  misc_feature (15)..(15): 2'-O-methyl-cytidine
  misc_feature (16)..(16): 2'-O-methyl-adenosine
  misc_feature (17)..(17): 2'-O-methyl-cytidine
  misc_feature (18)..(18): 2'-O-methyl-adenosine
  misc_feature (19)..(19): 5-[N-(1-naphthylmethyl)carboxyamide]-2'-deoxyuridine
  misc_feature (20)..(20): 2'-O-methyl-cytidine
  misc_feature (21)..(21): 5-[N-(1-naphthylmethyl)carboxyamide]-2'-O-methyl-uridine
nganannangnannnnnnnnn

SEQ ID NO: 809 - DNA, 21 bp, Artificial Sequence
  Synthetic
  misc_feature (1)..(1): 2'-O-methyl-cytidine
  misc_feature (4)..(4): 2'-O-methyl-cytidine
  misc_feature (6)..(6): 2'-O-methyl-guanosine
  misc_feature (7)..(7): 2'-O-methyl-cytidine
  misc_feature (9)..(9): 5-[N-(1-naphthylmethyl)carboxyamide]-2'-deoxyuridine
  misc_feature (11)..(11): 5-[N-(1-naphthylmethyl)carboxyamide]-2'-deoxyuridine
  misc_feature (13)..(13): 5-[N-(1-naphthylmethyl)carboxyamide]-2'-deoxyuridine
  misc_feature (14)..(14): 2'-O-methyl-guanosine
  misc_feature (15)..(15): 2'-O-methyl-cytidine
  misc_feature (16)..(16): 2'-O-methyl-adenosine
  misc_feature (17)..(17): 2'-O-methyl-cytidine
  misc_feature (18)..(18): 2'-O-methyl-adenosine
  misc_feature (19)..(19): 5-[N-(1-naphthylmethyl)carboxyamide]-2'-deoxyuridine-3'-phosphoro thioate
  misc_feature (20)..(20): 2'-O-methyl-cytidine
  misc_feature (21)..(21): 5-[N-(1-naphthylmethyl)carboxyamide]-2'-O-methyl-uridine
nganannangnannnnnnnnn

SEQ ID NO: 810 - DNA, 21 bp, Artificial Sequence
  Synthetic
  misc_feature (1)..(1): 2'-O-methyl-cytidine-3'-phosphorothioate
  misc_feature (4)..(4): 2'-O-methyl-cytidine
  misc_feature (6)..(6): 2'-O-methyl-guanosine
  misc_feature (7)..(7): 2'-O-methyl-cytidine
  misc_feature (9)..(9): 5-[N-(1-naphthylmethyl)carboxyamide]-2'-deoxyuridine
  misc_feature (11)..(11): 5-[N-(1-naphthylmethyl)carboxyamide]-2'-deoxyuridine
  misc_feature (13)..(13): 5-[N-(1-naphthylmethyl)carboxyamide]-2'-deoxyuridine
  misc_feature (14)..(14): 2'-O-methyl-guanosine
  misc_feature (15)..(15): 2'-O-methyl-cytidine
  misc_feature (16)..(16): 2'-O-methyl-adenosine
  misc_feature (17)..(17): 2'-O-methyl-cytidine
  misc_feature (18)..(18): 2'-O-methyl-adenosine
  misc_feature (19)..(19): 5-[N-(1-naphthylmethyl)carboxyamide]-2'-deoxyuridine
  misc_feature (20)..(20): 2'-O-methyl-cytidine
  misc_feature (21)..(21): 5-[N-(1-naphthylmethyl)carboxyamide]-2'-O-methyl-uridine
nganannangnannnnnnnnn

SEQ ID NO: 811 - DNA, 21 bp, Artificial Sequence
  Synthetic
  misc_feature (1)..(1): 2'-O-methyl-cytidine
  misc_feature (4)..(4): 2'-O-methyl-cytidine-3'-phosphorothioate
  misc_feature (6)..(6): 2'-O-methyl-guanosine
  misc_feature (7)..(7): 2'-O-methyl-cytidine
  misc_feature (9)..(9): 5-[N-(1-naphthylmethyl)carboxyamide]-2'-deoxyuridine
  misc_feature (11)..(11): 5-[N-(1-naphthylmethyl)carboxyamide]-2'-deoxyuridine
  misc_feature (13)..(13): 5-[N-(1-naphthylmethyl)carboxyamide]-2'-deoxyuridine
  misc_feature (14)..(14): 2'-O-methyl-guanosine
  misc_feature (15)..(15): 2'-O-methyl-cytidine
  misc_feature (16)..(16): 2'-O-methyl-adenosine
  misc_feature (17)..(17): 2'-O-methyl-cytidine
  misc_feature (18)..(18): 2'-O-methyl-adenosine
  misc_feature (19)..(19): 5-[N-(1-naphthylmethyl)carboxyamide]-2'-deoxyuridine
  misc_feature (20)..(20): 2'-O-methyl-cytidine
  misc_feature (21)..(21): 5-[N-(1-naphthylmethyl)carboxyamide]-2'-O-methyl-uridine
nganannangnannnnnnnnn

SEQ ID NO: 812 - DNA, 21 bp, Artificial Sequence
  Synthetic
  misc_feature (1)..(1): 2'-O-methyl-cytidine
  misc_feature (4)..(4): 2'-O-methyl-cytidine
  misc_feature (6)..(6): 2'-O-methyl-guanosine
  misc_feature (7)..(7): 2'-O-methyl-guanosine-3'-phosphorothioate
  misc_feature (9)..(9): 5-[N-(1-naphthylmethyl)carboxyamide]-2'-deoxyuridine
  misc_feature (11)..(11): 5-[N-(1-naphthylmethyl)carboxyamide]-2'-deoxyuridine
  misc_feature (13)..(13): 5-[N-(1-naphthylmethyl)carboxyamide]-2'-deoxyuridine
  misc_feature (14)..(14): 2'-O-methyl-guanosine
  misc_feature (15)..(15): 2'-O-methyl-cytidine
  misc_feature (16)..(16): 2'-O-methyl-adenosine
  misc_feature (17)..(17): 2'-O-methyl-cytidine
  misc_feature (18)..(18): 2'-O-methyl-adenosine
  misc_feature (19)..(19): 5-[N-(1-naphthylmethyl)carboxyamide]-2'-deoxyuridine
  misc_feature (20)..(20): 2'-O-methyl-cytidine
  misc_feature (21)..(21): 5-[N-(1-naphthylmethyl)carboxyamide]-2'-O-methyl-uridine
nganannangnannnnnnnnn

SEQ ID NO: 813 - DNA, 21 bp, Artificial Sequence
  Synthetic
  misc_feature (1)..(1): 2'-O-methyl-cytidine
  misc_feature (4)..(4): 2'-O-methyl-cytidine
  misc_feature (6)..(6): 2'-O-methyl-guanosine
  misc_feature (7)..(7): 2'-O-methyl-cytidine
  misc_feature (9)..(9): 5-[N-(1-naphthylmethyl)carboxyamide]-2'-deoxyuridine
  misc_feature (11)..(11): 5-[N-(1-naphthylmethyl)carboxyamide]-2'-deoxyuridine
  misc_feature (13)..(13): 5-[N-(1-naphthylmethyl)carboxyamide]-2'-deoxyuridine
  misc_feature (14)..(14): 2'-O-methyl-guanosine
  misc_feature (15)..(15): 2'-O-methyl-cytidine-3'-phosphorothioate
  misc_feature (16)..(16): 2'-O-methyl-adenosine
  misc_feature (17)..(17): 2'-O-methyl-cytidine
  misc_feature (18)..(18): 2'-O-methyl-adenosine
  misc_feature (19)..(19): 5-[N-(1-naphthylmethyl)carboxyamide]-2'-deoxyuridine
  misc_feature (20)..(20): 2'-O-methyl-cytidine
  misc_feature (21)..(21): 5-[N-(1-naphthylmethyl)carboxyamide]-2'-O-methyl-uridine
nganannangnannnnnnnnn

SEQ ID NO: 814 - DNA, 21 bp, Artificial Sequence
  Synthetic
  misc_feature (1)..(1): 2'-O-methyl-cytidine
  misc_feature (4)..(4): 2'-O-methyl-cytidine
  misc_feature (6)..(6): 2'-O-methyl-guanosine
  misc_feature (7)..(7): 2'-O-methyl-cytidine
  misc_feature (9)..(9): 5-[N-(1-naphthylmethyl)carboxyamide]-2'-deoxyuridine
  misc_feature (11)..(11): 5-[N-(1-naphthylmethyl)carboxyamide]-2'-deoxyuridine
  misc_feature (13)..(13): 5-[N-(1-naphthylmethyl)carboxyamide]-2'-deoxyuridine
  misc_feature (14)..(14): 2'-O-methyl-guanosine
  misc_feature (15)..(15): 2'-O-methyl-cytidine
  misc_feature (16)..(16): 2'-O-methyl-adenosine
  misc_feature (17)..(17): 2'-O-methyl-cytidine-3'-phosphorothioate
  misc_feature (18)..(18): 2'-O-methyl-adenosine
  misc_feature (19)..(19): 5-[N-(1-naphthylmethyl)carboxyamide]-2'-deoxyuridine
  misc_feature (20)..(20): 2'-O-methyl-cytidine
  misc_feature (21)..(21): 5-[N-(1-naphthylmethyl)carboxyamide]-2'-O-methyl-uridine
nganannangnannnnnnnnn

SEQ ID NO: 815 - DNA, 21 bp, Artificial Sequence
  Synthetic
  misc_feature (1)..(1): 2'-O-methyl-cytidine
  misc_feature (4)..(4): 2'-O-methyl-cytidine
  misc_feature (6)..(6): 2'-O-methyl-guanosine
  misc_feature (7)..(7): 2'-O-methyl-cytidine
  misc_feature (9)..(9): 5-[N-(1-naphthylmethyl)carboxyamide]-2'-deoxyuridine
  misc_feature (11)..(11): 5-[N-(1-naphthylmethyl)carboxyamide]-2'-deoxyuridine
  misc_feature (13)..(13): 5-[N-(1-naphthylmethyl)carboxyamide]-2'-deoxyuridine
  misc_feature (14)..(14): 2'-O-methyl-guanosine
  misc_feature (15)..(15): 2'-O-methyl-cytidine
  misc_feature (16)..(16): 2'-O-methyl-adenosine
  misc_feature (17)..(17): 2'-O-methyl-cytidine
  misc_feature (18)..(18): 2'-O-methyl-adenosine
  misc_feature (19)..(19): 5-[N-(1-naphthylmethyl)carboxyamide]-2'-deoxyuridine
  misc_feature (20)..(20): 2'-O-methyl-cytidine-3'-phosphorothioate
  misc_feature (21)..(21): 5-[N-(1-naphthylmethyl)carboxyamide]-2'-O-methyl-uridine
nganannangnannnnnnnnn

SEQ ID NO: 816 - DNA, 21 bp, Artificial Sequence
  Synthetic
  misc_feature (1)..(1): 2'-O-methyl-cytidine
  misc_feature (4)..(4): 2'-O-methyl-cytidine
  misc_feature (6)..(6): 2'-O-methyl-guanosine-3'-phosphorothioate
  misc_feature (7)..(7): 2'-O-methyl-cytidine
  misc_feature (9)..(9): 5-[N-(1-naphthylmethyl)carboxyamide]-2'-deoxyuridine
  misc_feature (11)..(11): 5-[N-(1-naphthylmethyl)carboxyamide]-2'-deoxyuridine
  misc_feature (13)..(13): 5-[N-(1-naphthylmethyl)carboxyamide]-2'-deoxyuridine
  misc_feature (14)..(14): 2'-O-methyl-guanosine
  misc_feature (15)..(15): 2'-O-methyl-cytidine
  misc_feature (16)..(16): 2'-O-methyl-adenosine
  misc_feature (17)..(17): 2'-O-methyl-cytidine
  misc_feature (18)..(18): 2'-O-methyl-adenosine
  misc_feature (19)..(19): 5-[N-(1-naphthylmethyl)carboxyamide]-2'-deoxyuridine
  misc_feature (20)..(20): 2'-O-methyl-cytidine
  misc_feature (21)..(21): 5-[N-(1-naphthylmethyl)carboxyamide]-2'-O-methyl-uridine
nganannangnannnnnnnnn

SEQ ID NO: 817 - DNA, 21 bp, Artificial Sequence
  Synthetic
  misc_feature (1)..(1): 2'-O-methyl-cytidine
  misc_feature (4)..(4): 2'-O-methyl-cytidine
  misc_feature (6)..(6): 2'-O-methyl-guanosine
  misc_feature (7)..(7): 2'-O-methyl-cytidine
  misc_feature (9)..(9): 5-[N-(1-naphthylmethyl)carboxyamide]-2'-deoxyuridine
  misc_feature (11)..(11): 5-[N-(1-naphthylmethyl)carboxyamide]-2'-deoxyuridine
  misc_feature (13)..(13): 5-[N-(1-naphthylmethyl)carboxyamide]-2'-deoxyuridine
  misc_feature (14)..(14): 2'-O-methyl-guanosine-3'-phosphorothioate
  misc_feature (15)..(15): 2'-O-methyl-cytidine
  misc_feature (16)..(16): 2'-O-methyl-adenosine
  misc_feature (17)..(17): 2'-O-methyl-cytidine
  misc_feature (18)..(18): 2'-O-methyl-adenosine
  misc_feature (19)..(19): 5-[N-(1-naphthylmethyl)carboxyamide]-2'-deoxyuridine
  misc_feature (20)..(20): 2'-O-methyl-cytidine
  misc_feature (21)..(21): 5-[N-(1-naphthylmethyl)carboxyamide]-2'-O-methyl-uridine
nganannangnannnnnnnnn

SEQ ID NO: 818 - DNA, 21 bp, Artificial Sequence
  Synthetic
  misc_feature (1)..(1): 2'-O-methyl-cytidine
  misc_feature (4)..(4): 2'-O-methyl-cytidine
  misc_feature (6)..(6): 2'-O-methyl-guanosine
  misc_feature (7)..(7): 2'-O-methyl-cytidine
  misc_feature (9)..(9): 5-[N-(1-naphthylmethyl)carboxyamide]-2'-deoxyuridine
  misc_feature (11)..(11): 5-[N-(1-naphthylmethyl)carboxyamide]-2'-deoxyuridine
  misc_feature (13)..(13): 5-[N-(1-naphthylmethyl)carboxyamide]-2'-deoxyuridine
  misc_feature (14)..(14): 2'-O-methyl-guanosine
  misc_feature (15)..(15): 2'-O-methyl-cytidine
  misc_feature (16)..(16): 2'-O-methyl-adenosine-3'-phosphorothioate
  misc_feature (17)..(17): 2'-O-methyl-cytidine
  misc_feature (18)..(18): 2'-O-methyl-adenosine
  misc_feature (19)..(19): 5-[N-(1-naphthylmethyl)carboxyamide]-2'-deoxyuridine
  misc_feature (20)..(20): 2'-O-methyl-cytidine
  misc_feature (21)..(21): 5-[N-(1-naphthylmethyl)carboxyamide]-2'-O-methyl-uridine
nganannangnannnnnnnnn

SEQ ID NO: 819 - DNA, 21 bp, Artificial Sequence
  Synthetic
  misc_feature (1)..(1): 2'-O-methyl-cytidine
  misc_feature (4)..(4): 2'-O-methyl-cytidine
  misc_feature (6)..(6): 2'-O-methyl-guanosine
  misc_feature (7)..(7): 2'-O-methyl-cytidine
  misc_feature (9)..(9): 5-[N-(1-naphthylmethyl)carboxyamide]-2'-deoxyuridine
  misc_feature (11)..(11): 5-[N-(1-naphthylmethyl)carboxyamide]-2'-deoxyuridine
  misc_feature (13)..(13): 5-[N-(1-naphthylmethyl)carboxyamide]-2'-deoxyuridine
  misc_feature (14)..(14): 2'-O-methyl-guanosine
  misc_feature (15)..(15): 2'-O-methyl-cytidine
  misc_feature (16)..(16): 2'-O-methyl-adenosine
  misc_feature (17)..(17): 2'-O-methyl-cytidine
  misc_feature (18)..(18): 2'-O-methyl-adenosine-3'-phosphorothioate
  misc_feature (19)..(19): 5-[N-(1-naphthylmethyl)carboxyamide]-2'-deoxyuridine
  misc_feature (20)..(20): 2'-O-methyl-cytidine
  misc_feature (21)..(21): 5-[N-(1-naphthylmethyl)carboxyamide]-2'-O-methyl-uridine
nganannangnannnnnnnnn

SEQ ID NO: 820 - DNA, 21 bp, Artificial Sequence
  Synthetic
  misc_feature (1)..(1): 2'-O-methyl-cytidine
  misc_feature (4)..(4): 2'-O-methyl-cytidine
  misc_feature (6)..(6): 2'-O-methyl-guanosine
  misc_feature (7)..(7): 2'-O-methyl-cytidine
  misc_feature (9)..(9): 5-[N-(1-naphthylmethyl)carboxyamide]-2'-deoxyuridine-3'-phosphoro thioate
  misc_feature (10)..(10): 2'-deoxyguanosine-3'-phosphorothioate
  misc_feature (11)..(11): 5-[N-(1-naphthylmethyl)carboxyamide]-2'-deoxyuridine-3'-phosphoro thioate
  misc_feature (12)..(12): 2'-deoxyadenosine-3'-phosphorothioate
  misc_feature (13)..(13): 5-[N-(1-naphthylmethyl)carboxyamide]-2'-deoxyuridine
  misc_feature (14)..(14): 2'-O-methyl-guanosine
  misc_feature (15)..(15): 2'-O-methyl-cytidine
  misc_feature (16)..(16): 2'-O-methyl-adenosine
  misc_feature (17)..(17): 2'-O-methyl-cytidine
  misc_feature (18)..(18): 2'-O-methyl-adenosine
  misc_feature (19)..(19): 5-[N-(1-naphthylmethyl)carboxyamide]-2'-deoxyuridine
  misc_feature (20)..(20): 2'-O-methyl-cytidine
  misc_feature (21)..(21): 5-[N-(1-naphthylmethyl)carboxyamide]-2'-O-methyl-uridine
nganannannnnnnnnnnnnn

SEQ ID NO: 821 - DNA, 21 bp, Artificial Sequence
  Synthetic
  misc_feature (1)..(1): 2'-O-methyl-cytidine
  misc_feature (4)..(4): 2'-O-methyl-cytidine-3'-phosphorothioate
  misc_feature (6)..(6): 2'-O-methyl-guanosine
  misc_feature (7)..(7): 2'-O-methyl-cytidine
  misc_feature (9)..(9): 5-[N-(1-naphthylmethyl)carboxyamide]-2'-deoxyuridine-3'-phosphoro thioate
  misc_feature (10)..(10): 2'-deoxyguanosine-3'-phosphorothioate
  misc_feature (11)..(11): 5-[N-(1-naphthylmethyl)carboxyamide]-2'-deoxyuridine-3'-phosphoro thioate
  misc_feature (12)..(12): 2'-deoxyadenosine-3'-phosphorothioate
  misc_feature (13)..(13): 5-[N-(1-naphthylmethyl)carboxyamide]-2'-deoxyuridine
  misc_feature (14)..(14): 2'-O-methyl-guanosine
  misc_feature (15)..(15): 2'-O-methyl-cytidine
  misc_feature (16)..(16): 2'-O-methyl-adenosine
  misc_feature (17)..(17): 2'-O-methyl-cytidine
  misc_feature (18)..(18): 2'-O-methyl-adenosine
  misc_feature (19)..(19): 5-[N-(1-naphthylmethyl)carboxyamide]-2'-deoxyuridine
  misc_feature (20)..(20): 2'-O-methyl-cytidine
  misc_feature (21)..(21): 5-[N-(1-naphthylmethyl)carboxyamide]-2'-O-methyl-uridine
nganannannnnnnnnnnnnn

SEQ ID NO: 822 - DNA, 24 bp, Artificial Sequence
  Synthetic
  misc_feature (1)..(2): 5-(N-benzylcarboxyamide)-2'-deoxyuridine
  misc_feature (3)..(3): 2'-O-methyl-adenosine
  misc_feature (5)..(5): hexaethylene glycol
  misc_feature (7)..(7): 5-(N-benzylcarboxyamide)-2'-O-methyl-uridine
  misc_feature (8)..(8): 5-(N-benzylcarboxyamide)-2'-deoxyuridine
  misc_feature (9)..(9): 2'-O-methyl-adenosine
  misc_feature (11)..(11): 3 carbon spacer
  misc_feature (12)..(12): 2'-O-methyl-cytidine
  misc_feature (13)..(13): 2'-O-methyl-guanosine
  misc_feature (15)..(15): 2'-deoxyguanosine-3'-phosphorothioate
  misc_feature (16)..(16): 5-[N-(1-naphthylmethyl)carboxyamide]-2'-deoxyuridine-3'-phosphoro thioate
  misc_feature (17)..(17): 5-(N-benzylcarboxyamide)-2'-deoxyuridine-3'-phosphorothioate
  misc_feature (18)..(18): 5-(N-benzylcarboxyamide)-2'-O-methyl-uridine
  misc_feature (19)..(19): 2'-O-methyl-adenosine
  misc_feature (20)..(20): 5-(N-benzylcarboxyamide)-2'-deoxyuridine
  misc_feature (21)..(21): 2'-O-methyl-adenosine
  misc_feature (24)..(24): 2'-O-methyl-guanosine
nnncngnnncnnncnnnnnnngcn

SEQ ID NO: 823 - DNA, 24 bp, Artificial Sequence
  Synthetic
  misc_feature (1)..(2): 5-(N-benzylcarboxyamide)-2'-deoxyuridine
  misc_feature (3)..(3): 2'-O-methyl-adenosine
  misc_feature (5)..(5): hexaethylene glycol
  misc_feature (7)..(7): 5-(N-benzylcarboxyamide)-2'-O-methyl-uridine
  misc_feature (8)..(8): 5-(N-benzylcarboxyamide)-2'-deoxyuridine
  misc_feature (9)..(9): 2'-deoxyadenosine-3'-phosphorothioate
  misc_feature (11)..(11): 3 carbon spacer
  misc_feature (12)..(12): 2'-O-methyl-cytidine
  misc_feature (15)..(15): 2'-deoxyguanosine-3'-phosphorothioate
  misc_feature (16)..(16): 5-[N-(1-naphthylmethyl)carboxyamide]-2'-deoxyuridine-3'-phosphoro thioate
  misc_feature (17)..(17): 5-(N-benzylcarboxyamide)-2'-deoxyuridine-3'-phosphorothioate
  misc_feature (18)..(18): 5-(N-benzylcarboxyamide)-2'-O-methyl-uridine
  misc_feature (19)..(19): 2'-O-methyl-adenosine
  misc_feature (20)..(20): 5-(N-benzylcarboxyamide)-2'-deoxyuridine
  misc_feature (21)..(21): 2'-O-methyl-adenosine
  misc_feature (24)..(24): 2'-O-methyl-guanosine
nnncngnnncnngcnnnnnnngcn

SEQ ID NO: 824 - DNA, 24 bp, Artificial Sequence
  Synthetic
  misc_feature (1)..(2): 5-(N-benzylcarboxyamide)-2'-deoxyuridine
  misc_feature (3)..(3): 2'-O-methyl-adenosine
  misc_feature (5)..(5): hexaethylene glycol
  misc_feature (7)..(7): 5-(N-benzylcarboxyamide)-2'-O-methyl-uridine
  misc_feature (8)..(8): 5-(N-benzylcarboxyamide)-2'-deoxyuridine-3'-phosphorothioate
  misc_feature (9)..(9): 2'-deoxyadenosine-3'-phosphorothioate
  misc_feature (11)..(11): 3 carbon spacer
  misc_feature (12)..(12): 2'-O-methyl-cytidine
  misc_feature (13)..(13): 2'-O-methyl-guanosine
  misc_feature (15)..(15): 2'-deoxyguanosine-3'-phosphorothioate
  misc_feature (16)..(16): 5-[N-(1-naphthylmethyl)carboxyamide]-2'-deoxyuridine-3'-phosphoro thioate
  misc_feature (17)..(17): 5-(N-benzylcarboxyamide)-2'-deoxyuridine-3'-phosphorothioate
  misc_feature (18)..(18): 5-(N-benzylcarboxyamide)-2'-O-methyl-uridine
  misc_feature (19)..(19): 2'-O-methyl-adenosine
  misc_feature (20)..(20): 5-(N-benzylcarboxyamide)-2'-deoxyuridine
  misc_feature (21)..(21): 2'-O-methyl-adenosine
  misc_feature (24)..(24): 2'-O-methyl-guanosine
nnncngnnncnnncnnnnnnngcn

SEQ ID NO: 825 - DNA, 24 bp, Artificial Sequence
  Synthetic
  misc_feature (1)..(2): 5-(N-benzylcarboxyamide)-2'-deoxyuridine
  misc_feature (3)..(3): 2'-O-methyl-adenosine
  misc_feature (5)..(5): hexaethylene glycol
  misc_feature (7)..(7): 5-(N-benzylcarboxyamide)-2'-O-methyl-uridine
  misc_feature (8)..(8): 5-(N-benzylcarboxyamide)-2'-deoxyuridine-3'-phosphorothioate
  misc_feature (9)..(9): 2'-deoxyadenosine-3'-phosphorothioate
  misc_feature (11)..(11): 3 carbon spacer
  misc_feature (12)..(12): 2'-O-methyl-cytidine
  misc_feature (15)..(15): 2'-deoxyguanosine-3'-phosphorothioate
  misc_feature (16)..(16): 5-[N-(1-naphthylmethyl)carboxyamide]-2'-deoxyuridine-3'-phosphoro thioate
  misc_feature (17)..(17): 5-(N-benzylcarboxyamide)-2'-deoxyuridine-3'-phosphorothioate
  misc_feature (18)..(18): 5-(N-benzylcarboxyamide)-2'-O-methyl-uridine
  misc_feature (19)..(19): 2'-O-methyl-adenosine
  misc_feature (20)..(20): 5-(N-benzylcarboxyamide)-2'-deoxyuridine
  misc_feature (21)..(21): 2'-O-methyl-adenosine
  misc_feature (24)..(24): 2'-O-methyl-guanosine
nnncngnnncnngcnnnnnnngcn

SEQ ID NO: 826 - DNA, 24 bp, Artificial Sequence
  Synthetic
  misc_feature (1)..(2): 5-(N-benzylcarboxyamide)-2'-deoxyuridine
  misc_feature (3)..(3): 2'-O-methyl-adenosine
  misc_feature (4)..(4): 2'-deoxycytidine-3'-phosphorothioate
  misc_feature (5)..(5): hexaethylene glycol
  misc_feature (7)..(7): 5-(N-benzylcarboxyamide)-2'-O-methyl-uridine
  misc_feature (8)..(8): 5-(N-benzylcarboxyamide)-2'-deoxyuridine-3'-phosphorothioate
  misc_feature (9)..(9): 2'-deoxyadenosine-3'-phosphorothioate
  misc_feature (10)..(10): 2'-deoxycytidine-3'-phosphorothioate
  misc_feature (11)..(11): 3 carbon spacer
  misc_feature (12)..(12): 2'-O-methyl-cytidine
  misc_feature (13)..(13): 2'-O-methyl-guanosine
  misc_feature (15)..(15): 2'-deoxyguanosine-3'-phosphorothioate
  misc_feature (16)..(16): 5-[N-(1-naphthylmethyl)carboxyamide]-2'-deoxyuridine-3'-phosphoro thioate
  misc_feature (17)..(17): 5-(N-benzylcarboxyamide)-2'-deoxyuridine-3'-phosphorothioate
  misc_feature (18)..(18): 5-(N-benzylcarboxyamide)-2'-O-methyl-uridine-3'-phosphorothioate
  misc_feature (19)..(19): 2'-O-methyl-adenosine
  misc_feature (20)..(20): 5-(N-benzylcarboxyamide)-2'-deoxyuridine
  misc_feature (21)..(21): 2'-O-methyl-adenosine
  misc_feature (24)..(24): 2'-O-methyl-guanosine
nnnnngnnnnnnncnnnnnnngcn

SEQ ID NO: 827 - DNA, 24 bp, Artificial Sequence
  Synthetic
  misc_feature (1)..(2): 5-(N-benzylcarboxyamide)-2'-deoxyuridine
  misc_feature (3)..(3): 2'-O-methyl-adenosine
  misc_feature (4)..(4): 2'-deoxycytidine-3'-phosphorothioate
  misc_feature (5)..(5): hexaethylene glycol
  misc_feature (7)..(7): 5-(N-benzylcarboxyamide)-2'-O-methyl-uridine
  misc_feature (8)..(8): 5-(N-benzylcarboxyamide)-2'-deoxyuridine-3'-phosphorothioate
  misc_feature (9)..(9): 2'-deoxyadenosine-3'-phosphorothioate
  misc_feature (10)..(10): 2'-deoxycytidine-3'-phosphorothioate
  misc_feature (11)..(11): 3 carbon spacer
  misc_feature (12)..(12): 2'-O-methyl-cytidine
  misc_feature (13)..(13): 2'-O-methyl-guanosine
  misc_feature (14)..(14): 2'-deoxycytidine-3'-phosphorothioate
  misc_feature (15)..(15): 2'-deoxyguanosine-3'-phosphorothioate
  misc_feature (16)..(16): 5-[N-(1-naphthylmethyl)carboxyamide]-2'-deoxyuridine-3'-phosphoro thioate
  misc_feature (17)..(17): 5-(N-benzylcarboxyamide)-2'-deoxyuridine-3'-phosphorothioate
  misc_feature (18)..(18): 5-(N-benzylcarboxyamide)-2'-O-methyl-uridine-3'-phosphorothioate
  misc_feature (19)..(19): 2'-O-methyl-adenosine
  misc_feature (20)..(20): 5-(N-benzylcarboxyamide)-2'-deoxyuridine
  misc_feature (21)..(21): 2'-O-methyl-adenosine
  misc_feature (24)..(24): 2'-O-methyl-guanosine
nnnnngnnnnnnnnnnnnnnngcn

SEQ ID NO: 828 - DNA, 24 bp, Artificial Sequence
  Synthetic
  misc_feature (1)..(2): 5-(N-benzylcarboxyamide)-2'-deoxyuridine
  misc_feature (3)..(3): 2'-O-methyl-adenosine
  misc_feature (5)..(5): hexaethylene glycol
  misc_feature (7)..(7): 5-(N-benzylcarboxyamide)-2'-O-methyl-uridine
  misc_feature (8)..(8): 5-(N-benzylcarboxyamide)-2'-deoxyuridine-3'-phosphorothioate
  misc_feature (9)..(9): 2'-deoxyadenosine-3'-phosphorothioate
  misc_feature (10)..(10): 2'-deoxycytidine-3'-phosphorothioate
  misc_feature (11)..(11): 3 carbon spacer
  misc_feature (12)..(12): 2'-O-methyl-cytidine
  misc_feature (13)..(13): 2'-O-methyl-guanosine
  misc_feature (15)..(15): 2'-deoxyguanosine-3'-phosphorothioate
  misc_feature (16)..(16): 5-[N-(1-naphthylmethyl)carboxyamide]-2'-deoxyuridine-3'-phosphoro thioate
  misc_feature (17)..(17): 5-(N-benzylcarboxyamide)-2'-deoxyuridine-3'-phosphorothioate
  misc_feature (18)..(18): 5-(N-benzylcarboxyamide)-2'-O-methyl-uridine
  misc_feature (19)..(19): 2'-O-methyl-adenosine
  misc_feature (20)..(20): 5-(N-benzylcarboxyamide)-2'-deoxyuridine
  misc_feature (21)..(21): 2'-O-methyl-adenosine
  misc_feature (24)..(24): 2'-O-methyl-guanosine
nnncngnnnnnnncnnnnnnngcn

SEQ ID NO: 829 - DNA, 24 bp, Artificial Sequence
  Synthetic
  misc_feature (1)..(1): 5-(N-benzylcarboxyamide)-2'-deoxyuridine
  misc_feature (2)..(2): 5-(N-3,4-methylenedioxybenzylcarboxyamide)-2'-deoxyuridine
  misc_feature (3)..(3): 2'-O-methyl-adenosine
  misc_feature (5)..(5): hexaethylene glycol
  misc_feature (7)..(7): 5-(N-benzylcarboxyamide)-2'-O-methyl-uridine
  misc_feature (8)..(8): 5-(N-benzylcarboxyamide)-2'-deoxyuridine
  misc_feature (11)..(11): 3 carbon spacer
  misc_feature (12)..(12): 2'-O-methyl-cytidine
  misc_feature (15)..(15): 2'-O-methyl-guanosine
  misc_feature (16)..(16): 5-(N-isobutylcarboxyamide)-2'-deoxyuridine
  misc_feature (17)..(17): 5-(N-benzylcarboxyamide)-2'-deoxyuridine
  misc_feature (18)..(18): 5-(N-benzylcarboxyamide)-2'-O-methyl-uridine
  misc_feature (19)..(19): 2'-O-methyl-adenosine
  misc_feature (20)..(20): 5-(N-benzylcarboxyamide)-2'-deoxyuridine
  misc_feature (21)..(21): 2'-O-methyl-adenosine
  misc_feature (24)..(24): 2'-O-methyl-guanosine
nnncngnnacnngcnnnnnnngcn

SEQ ID NO: 830 - DNA, 21 bp, Artificial Sequence
  Synthetic
  misc_feature (9)..(9): C-5 modified pyrimidine
  misc_feature (11)..(11): C-5 modified pyrimidine
  misc_feature (13)..(13): C-5 modified pyrimidine
  misc_feature (19)..(19): C-5 modified pyrimidine
  misc_feature (21)..(21): C-5 modified pyrimidine
cgacagcangnangcacancn

SEQ ID NO: 831 - DNA, 29 bp, Artificial Sequence
  Synthetic
  misc_feature (4)..(5): C-5 modified pyrimidine
  misc_feature (10)..(10): C-5 modified pyrimidine
  misc_feature (13)..(14): C-5 modified pyrimidine
  misc_feature (16)..(16): C-5 modified pyrimidine
  misc_feature (21)..(23): C-5 modified pyrimidine
  misc_feature (27)..(27): C-5 modified pyrimidine
ccgnncaagngcnngnaggannnaaangg

SEQ ID NO: 832 - DNA, 24 bp, Artificial Sequence
  Synthetic
  misc_feature (1)..(2): PedU, ThdU, 5-(N-[1-(3-trimethylamonium) propyl]carboxyamide)-2'-dU, 2NapdU, 2'-O-methyl 2NapdU, MBndU, or 5-(N-[1-(2,3-dihydroxypropyl)]carboxyamide)-2'-dU, (BndU, NapdU, iBudU, TrpdU), or 2'-O-methyl or 2'-fluoro thereof
  misc_feature (5)..(5): hexaethylene glycol
  misc_feature (7)..(8): PedU, ThdU, 5-(N-[1-(3-trimethylamonium) propyl]carboxyamide)-2'-dU, 2NapdU, 2'-O-methyl 2NapdU, MBndU, or 5-(N-[1-(2,3-dihydroxypropyl)]carboxyamide)-2'-dU, (BndU, NapdU, iBudU, TrpdU), or 2'-O-methyl or 2'-fluoro thereof
  misc_feature (11)..(11): 3 carbon spacer
  misc_feature (16)..(16): PedU, ThdU, 5-(N-[1-(3-trimethylamonium) propyl]carboxyamide)-2'-dU, 2NapdU, 2'-O-methyl 2NapdU, MBndU, or 5-(N-[1-(2,3-dihydroxypropyl)]carboxyamide)-2'-dU, (BndU, NapdU, iBudU, TrpdU), or 2'-O-methyl or 2'-fluoro thereof
  misc_feature (17)..(18): PedU, ThdU, 5-(N-[1-(3-trimethylamonium) propyl]carboxyamide)-2'-dU, 2NapdU, 2'-O-methyl 2NapdU, MBndU, or 5-(N-[1-(2,3-dihydroxypropyl)]carboxyamide)-2'-dU, (BndU, NapdU, iBudU, TrpdU), or 2'-O-methyl or 2'-fluoro thereof
  misc_feature (20)..(20): PedU, ThdU, 5-(N-[1-(3-trimethylamonium) propyl]carboxyamide)-2'-dU, 2NapdU, 2'-O-methyl 2NapdU, MBndU, or 5-(N-[1-(2,3-dihydroxypropyl)]carboxyamide)-2'-dU, (BndU, NapdU, iBudU, TrpdU), or 2'-O-methyl or 2'-fluoro thereof
nnacngnnacncgcgnnnanagcg

SEQ ID NO: 833 - DNA, 21 bp, Artificial Sequence
  Synthetic
  misc_feature (1)..(1): selected from the group consisting of a cytidine, a deoxycytidine and a 2'-O-methylcytidine
  misc_feature (4)..(4): a cytidine, a cytidine comprising a phosphorothioate linkage, a deoxycytidine, a deoxycytidine comprising a phosphorothioate linkage, a 2'-O-methylcytidine or a 2'-O-methylcytidine comprising a phosphorothioate linkage
  misc_feature (6)..(6): selected from the group consisting of a guanosine, a deoxyguanosine and a 2'-O-methylguanosine
  misc_feature (7)..(7): selected from the group consisting of a cytidine, a deoxycytidine and a 2'-O-methylcytidine
  misc_feature (9)..(9): a uridine, a uridine comprising a phosphorothioate linkage, a deoxyuridine, a deoxyuridine comprising a phosphorothioate linkage, a NapdU or  a NapdU comprising a phosphorothioate linkage
  misc_feature (10)..(10): selected from the group consisting of a guanosine, a guanosine comprising a phosphorothioate linkage, a deoxyguanosine and a deoxyguanosine comprising a phosphorothioate linkage
  misc_feature (11)..(11): a uridine, a uridine comprising a phosphorothioate linkage, a deoxyuridine, a deoxyuridine comprising a phosphorothioate linkage, a NapdU or  a NapdU comprising a phosphorothioate linkage
  misc_feature (12)..(12): selected from the group consisting of an adenosine, an adenosine comprising a phosphorothioate linkage, a deoxyadenosine and a deoxyadenosine comprising a phosphorothioate linkage
  misc_feature (13)..(13): selected from the group consisted of a uridine, a deoxyuridine and a 5-(N-naphthylmethylcarboxyamide)-2'-deoxyuridine (NapdU)
  misc_feature (14)..(14): selected from the group consisting of a guanosine, a deoxyguanosine and a 2'-O-methylguanosine
  misc_feature (15)..(15): selected from the group consisting of a cytidine, a deoxycytidine and a 2'-O-methylcytidine
  misc_feature (16)..(16): selected from the group consisting of an adenosine, a deoxyadenosine and a 2'-O-methyladenosine
  misc_feature (17)..(17): selected from the group consisting of a cytidine, a deoxycytidine and a 2'-O-methylcytidine
  misc_feature (18)..(18): selected from the group consisting of an adenosine, a deoxyadenosine and a 2'-O-methyladenosine
  misc_feature (19)..(19): selected from the group consisted of a uridine, a deoxyuridine and a 5-(N-naphthylmethylcarboxyamide)-2'-deoxyuridine (NapdU)
  misc_feature (20)..(20): selected from the group consisting of a cytidine, a deoxycytidine and a 2'-O-methylcytidine
  misc_feature (21)..(21): a uridine, a deoxyuridine, a 2'-O-methyluridine, a 5-(N-naphthylmethylcarboxyamide)-2'-deoxyuridine (NapdU) or a NapdU comprising a 2'-O-methyl group
nganannannnnnnnnnnnnn

SEQ ID NO: 834 - DNA, 29 bp, Artificial Sequence
  Synthetic
  misc_feature (1)..(1): selected from the group consisting of a cytidine, a deoxycytidine and a 2'-O-methylcytidine
  misc_feature (4)..(5): selected from the group consisted of a uridine, a deoxyuridine and a 5-(N-naphthylmethylcarboxyamide)-2'-deoxyuridine (NapdU)
  misc_feature (6)..(6): selected from the group consisting of a cytidine, a deoxycytidine and a 2'-O-methylcytidine
  misc_feature (9)..(9): selected from the group consisting of a guanosine, a deoxyguanosine and a 2'-O-methylguanosine
  misc_feature (10)..(10): selected from the group consisted of a uridine, a deoxyuridine and a 5-(N-naphthylmethylcarboxyamide)-2'-deoxyuridine (NapdU)
  misc_feature (12)..(12): selected from the group consisting of a cytidine, a deoxycytidine and a 2'-O-methylcytidine
  misc_feature (13)..(14): selected from the group consisted of a uridine, a deoxyuridine and a 5-(N-naphthylmethylcarboxyamide)-2'-deoxyuridine (NapdU)
  misc_feature (15)..(15): selected from the group consisting of a guanosine, a deoxyguanosine and a 2'-O-methylguanosine
  misc_feature (16)..(16): selected from the group consisted of a uridine, a deoxyuridine and a 5-(N-naphthylmethylcarboxyamide)-2'-deoxyuridine (NapdU)
  misc_feature (17)..(17): selected from the group consisting of an adenosine, a deoxyadenosine and a 2'-O-methyladenosine
  misc_feature (18)..(18): selected from the group consisting of a guanosine, a deoxyguanosine and a 2'-O-methylguanosine
  misc_feature (21)..(21): selected from the group consisted of a uridine, a deoxyuridine and a 5-(N-naphthylmethylcarboxyamide)-2'-deoxyuridine (NapdU)
  misc_feature (22)..(22): a uridine, a deoxyuridine, a 2'-O-methyluridine, a NapdU or  a NapdU comprising a 2'-O-methyl group
  misc_feature (23)..(23): selected from the group consisted of a uridine, a deoxyuridine and a 5-(N-naphthylmethylcarboxyamide)-2'-deoxyuridine (NapdU)
  misc_feature (24)..(26): selected from the group consisting of an adenosine, an adenosine comprising a phosphorothioate linkage, a deoxyadenosine and a deoxyadenosine comprising a phosphorothioate linkage
  misc_feature (27)..(27): selected from the group consisted of a uridine, a deoxyuridine and a 5-(N-naphthylmethylcarboxyamide)-2'-deoxyuridine (NapdU)
  misc_feature (28)..(29): selected from the group consisting of a guanosine, a deoxyguanosine and a 2'-O-methylguanosine
ncgnnnaanngnnnnnnngannnnnnnnn

SEQ ID NO: 835 - DNA, 24 bp, Artificial Sequence
  Synthetic
  misc_feature (1)..(1): selected from the group consisting of a uridine, a deoxyuridine, a NapdU, a 2NapdU, a BndU and a MBndU
  misc_feature (2)..(2): selected from the group consisting of a uridine, a deoxyuridine, a 5-(N-benzylcarboxyamide)-2?-deoxyuridine (BndU) and a 5-(N-3,4-methylenedioxybenzylcarboxyamide)-2'-deoxyuridine (MBndU)
  misc_feature (3)..(3): selected from the group consisting of an adenosine, a deoxyadenosine and a 2'-O-methyladenosine
  misc_feature (5)..(5): hexaethylene glycol
  misc_feature (7)..(7): a uridine, a deoxyuridine, a 2'-O-methyluridine, a NapdU, a 2'-O-methyl NapdU, a BndU, a 2'-O-methyl BndU, a MBndU or a 2'-O-methyl MBndU
  misc_feature (8)..(8): a uridine, a deoxyuridine, a NapdU, a BndU, a MBndU, or derivative thereof comprising a phosphorothioate linkage
  misc_feature (9)..(9): selected from the group consisting of an adenosine, an adenosine comprising a phosphorothioate linkage, a deoxyadenosine and a deoxyadenosine comprising a phosphorothioate linkage
  misc_feature (11)..(11): 3 carbon spacer
  misc_feature (12)..(12): selected from the group consisting of a cytidine, a deoxycytidine and a 2'-O-methylcytidine
  misc_feature (13)..(13): selected from the group consisting of a guanosine, a deoxyguanosine and a 2'-O-methylguanosine
  misc_feature (15)..(15): selected from the group consisting of a guanosine, a guanosine comprising a phosphorothioate linkage, a deoxyguanosine and a deoxyguanosine comprising a phosphorothioate linkage
  misc_feature (16)..(16): a uridine, a deoxyuridine, a BndU, a 2NapdU, a NapdU,  or derivative thereof comprising a phosphorothioate linkage
  misc_feature (17)..(17): a uridine, a deoxyuridine, a NapdU, a BndU, a MBndU, or derivative thereof comprising a phosphorothioate linkage
  misc_feature (18)..(18): a uridine, a deoxyuridine, a 2'-O-methyluridine, a NapdU, a 2'-O-methyl NapdU, a BndU, a 2'-O-methyl BndU, a MBndU or a 2'-O-methyl MBndU
  misc_feature (19)..(19): selected from the group consisting of an adenosine, a deoxyadenosine and a 2'-O-methyladenosine
  misc_feature (20)..(20): selected from the group consisting of a uridine, a deoxyuridine, a NapdU, a 2NapdU, a BndU and a MBndU
  misc_feature (21)..(21): selected from the group consisting of an adenosine, a deoxyadenosine and a 2'-O-methyladenosine
  misc_feature (24)..(24): selected from the group consisting of a guanosine, a deoxyguanosine and a 2'-O-methylguanosine
nnncngnnncnnncnnnnnnngcn

SEQ ID NO: 836 - DNA, 29 bp, Artificial Sequence
  Synthetic
  misc_feature (4)..(5): selected from the group consisted of a uridine, a deoxyuridine and a 5-(N-naphthylmethylcarboxyamide)-2'-deoxyuridine (NapdU)
  misc_feature (6)..(6): selected from the group consisting of a cytidine, a deoxycytidine and a 2'-O-methylcytidine
  misc_feature (9)..(9): selected from the group consisting of a guanosine, a deoxyguanosine and a 2'-O-methylguanosine
  misc_feature (10)..(10): selected from the group consisted of a uridine, a deoxyuridine and a 5-(N-naphthylmethylcarboxyamide)-2'-deoxyuridine (NapdU)
  misc_feature (12)..(12): selected from the group consisting of a cytidine, a deoxycytidine and a 2'-O-methylcytidine
  misc_feature (13)..(14): selected from the group consisted of a uridine, a deoxyuridine and a 5-(N-naphthylmethylcarboxyamide)-2'-deoxyuridine (NapdU)
  misc_feature (15)..(15): selected from the group consisting of a guanosine, a deoxyguanosine and a 2'-O-methylguanosine
  misc_feature (16)..(16): selected from the group consisted of a uridine, a deoxyuridine and a 5-(N-naphthylmethylcarboxyamide)-2'-deoxyuridine (NapdU)
  misc_feature (17)..(17): selected from the group consisting of an adenosine, a deoxyadenosine and a 2'-O-methyladenosine
  misc_feature (18)..(18): selected from the group consisting of a guanosine, a deoxyguanosine and a 2'-O-methylguanosine
  misc_feature (21)..(21): selected from the group consisted of a uridine, a deoxyuridine and a 5-(N-naphthylmethylcarboxyamide)-2'-deoxyuridine (NapdU)
  misc_feature (22)..(22): selected from the group consisted of a uridine, a deoxyuridine, a 2'-O-methyluridine, a NapdU and  a NapdU comprising a 2'-O-methyl group
  misc_feature (23)..(23): selected from the group consisted of a uridine, a deoxyuridine and a 5-(N-naphthylmethylcarboxyamide)-2'-deoxyuridine (NapdU)
  misc_feature (24)..(26): selected from the group consisting of an adenosine, an adenosine comprising a phosphorothioate linkage, a deoxyadenosine and a deoxyadenosine comprising a phosphorothioate linkage
  misc_feature (27)..(27): selected from the group consisted of a uridine, a deoxyuridine and a 5-(N-naphthylmethylcarboxyamide)-2'-deoxyuridine (NapdU)
  misc_feature (28)..(29): selected from the group consisting of a guanosine, a deoxyguanosine and a 2'-O-methylguanosine
ccgnnnaanngnnnnnnngannnnnnnnn

SEQ ID NO: 837 - DNA, 17 bp, Artificial Sequence
  Synthetic
cgccctcgtcccatctc

SEQ ID NO: 838 - DNA, 18 bp, Artificial Sequence
  Synthetic
cgttctcggttggtgttc

SEQ ID NO: 839 - DNA, 17 bp, Artificial Sequence
  Synthetic
  misc_feature (1)..(1): modified pyrimidine
  misc_feature (4)..(4): Any naturally occurring or modified nucleotide
  misc_feature (9)..(11): modified pyrimidine
  misc_feature (13)..(13): modified pyrimidine
nacncgcgnnnanagcg

SEQ ID NO: 840 - protein, 160 aa, Homo Sapiens
SLGSLTIAEPAMIAECKTRTEVFEISRRLIDRTNANFLVWPPCVEVQRCSGCCNNRNVQCRPTQVQLRPVQVRKIEIVRKKPIFKKATVTLEDHLACKCETVAAARPVTRSPGGSQEQRAKTPQTRVTIRTVRVRRPPKGKHRKFKHTHDKTALKETLGA

SEQ ID NO: 841 - protein, 125 aa, Homo sapiens
SIEEAVPAVCKTRTVIYEIPRSQVDPTSANFLIWPPCVEVKRCTGCCNTSSVKCQPSRVHHRSVKVAKVEYVRKKPKLKEVQVRLEEHLECACATTSLNPDYREEDTGRPRESGKKRKRKRLKPT

SEQ ID NO: 842 - protein, 111 aa, Homo sapiens
VVDLNLLTEEVRLYSCTPRNFSVSIREELKRTDTIFWPGCLLVKRCGGNCACCLHNCNECQCVPSKVTKKYHEVLQLRPKTGVRGLHKSLTDVALEHHEECDCVCRGSTGG

SEQ ID NO: 843 - protein, 121 aa, Homo sapiens
SYHDRKSKVDLDRLNDDAKRYSCTPRNYSVNIREELKLANVVFFPRCLLVQRCGGNCGCGTVNWRSCTCNSGKTVKKYHEVLQFEPGHIKRRGRAKTMALVDIQLDHHERCDCICSSRPPR

SEQ ID NO: 844 - DNA, 16 bp, Artificial Sequence
  Synthetic
gccacaccctgccctc

SEQ ID NO: 845 - DNA, 18 bp, Artificial Sequence
  Synthetic
gaggacacagacagacac
